United States Patent Application Publication US 2026/0265781 A1 - sequence listing, part 9

SEQ ID NO: 22 - DNA, 26290500 bp, synthetic construct (residues 17,527,001-19,717,875 of 26,290,500)
  source 1..26290500: mol_type = other DNA; note = Hot spot 1 - Chr 3 contig ref|NW_020822499.1 from Cricetulus griseus
attctcctataagtagtccccttgggtattttactcataatgataaaaagtttgatttttgaagagatattttttcagttacttgttgaggtccatgactaattagaacagttacaagaaaaatttaaaagtcacataacaaacctcaagtcatcagttttgacttgtgaaacagggaacctcagtttaaactccatatgcatttttacacatcattttcactgtgaggataatggaggtcatagtagaagttacaaattaaaatgtcttccatacccttgggtgagagtcctcttctagacaatctggaagttagcactataattgaagcaatatttgtgttcctcggtgtctggtggtattgaatagtgctcttttaaaaataaaacatctaataaatgtatggtactacttctctgtctcctatttttttctgctacttactgtttaatgaaaatcaataaaattacacctctattatttgagttttaaatagaatctactgactccttacttggaaagataaatattttctagtgcatttgaacttccatcagtctttgttatttactaagtgttacttgtaatattatcttttaattgttaaatttcatgacatattatcttctctaacaagttcttaaaataaaaataaaaactccaataataaattaacaccatttcagtattataagtatacagatgtttcaaagacatatataattgaacataaatgtaaatcataataagcaaaaaactaaaataactaagtaatatagtaatgcatgcaactgaagatatggactagatgaggtcaagaaaaccagaatattaaatgtattttaagtacaatatatgttttacatatgcgtgcacgtgtgtgtgtgtgtgtgtgtgtgtgtgtgtgtgtgtgtgtgtgtgtgtgtagtatgtgtgtaaccagttaactgaagttcaaaaaatgagtatattccttatcttataatttacatcaaagtaagatccatgagtgttaagataaaaatatagtttcaggcagtggtggcatacacctttaatcccagcacttgggaggtagaggcaggtggatccttgtgagtttgagaccagcctggtctacaagagctagttctaagaaagctccaaagccacagagaaactctgtcccaaaaaaacaaaaaaaaaaagacataaatgtataatgtagaaacatataaattaacatgcaaaataggtcatttcagctatattatactgactatgaaatacatattctattataaaacataatataaaatataaataatatttaatattcaaatatgcagtattacagtgttctatactttaaataaacttacaaaacatacagtataattttatgacttatcaaggtctgccttttacagagagattgaaacatgggactcttttatagaaaagggaactgtatgaaagaatatctttcagagagaaagagccattagtgtttgaatattgttgtccttaaagcattgtactgcagtgataagtctttactccaaagccacctgagccctgccaccatatgggtgcttagaataacatacagagacttatattaggtacaaatgctgctagccaatggactaggatttcttacttgctagttcagacttaagtatcaaccataaagacttatcatatctggtcttctcttgccaggatcacatggaggctccatagagaagacagcaggaggaagagagagagaaaaggacaacttcctatttgtccctgcttatatatgagtcagtctgctatgtcatttcctgcctggatatctttactacattttccagaatcctccttgactcctagtcccacttatcttgctttcctattggccaaaagtacttatttataaaccaataagatatacatacccagaacgacattccccatcattgtacccatttctattactttttaactttgtaaccacaagtagctgccagtgacaccaatgctgcaggagcaggatgttctgaccagatatgtagttaagcctgcaaaaatgctgaactctccaggcattggtggccacgcctttaatcccagcactcgggaggcagaggcaggcggatctctgtgagtttgaggccagcctggtctccagagcgagtgccagaataggctccaaaagctacacagagaaaccataaaaaaaaatgctgaactctatgtctagaataagtttatgtaaggggttagaaaatatgtttaggaaaacaaaaaggtgaacaataggggcttttgtaatgattatgatgtgttttctaaaatatgatgtatttcttaaaagtcaaaaataggagccaataataaattgttcatttaagtcttgtagaaaaaaattctgttaaagtatgaataaagatggcttgagctatttggggccacttgagtgcaatacacctggtggtcagaattttccttaaactgatgccccctccccattttaggaactgaacccaagccaaggctggaccccagtaccaaaattcataaatagttagaaatctggatatcaagaaaacaaataatccaatttttaaattgagatatagatctaaacataattctcaaaagaagaaacacaaatgtctgaaaaccacttaaagaaaagttcaacaactttattcatcagggaaaatcaaatcaaaactactttgagagttcatgttacatccctcagaatagctaagatcaataaaagaaatgacagctcatgatgaggagaatgttgagtaaaaggaacactcattcattgctggtggtactgcaaacttatacaacccctatagaaataagtgtaacagttcctcgggaagacagaaattgctatacctcaagatccagctataccactcttgggcatatatccaaaagttgcttcatcctaacacggagacatttgtttaaccatgttcattaatactttattcataacagccagaagggaacaacctcaatgtccctcaacagatggatggattaagaaattctggtatatttacacaatggaatattactcacccattaaaattaaaattatgaaatttgcatgtaaatggacagaaccagaaaaatatcatgctgagagaggttacccaaacccagaaagacacgccagaatagacatagttaggatgtgaaatagcagattattgtatcttcctgtatttcacctttatgattgctaattttggatgttttacactattaagtcttaatcctcttttagactaaaaggggaattgtagggagacactgtagcccagcctcctggtagcccctacaggtatgcctggccacgccctcacgggcgtggtcaggggaagtcaaagatgactcggaatgattcttaagggaccgtgcacacgtggatagccttctctctggccacgctagcttgcaacctcagggcacactctggcttgcgttttgggctggtgtttatctgaataaagaaatattagccttacggactagggatcatccttgagtgcatgcagcacagaataatcaacatgggtcagtggcttcaaagcaattttttcatgaattcatacttttttaaattgagcaccaataataacacaattaattaaaaaaacagagtcaaatattggggttcaagctgaaagatcagagaagcaaagaagctggcggctagctcttacctctacctcagaccaaaatgggtaatcttgtctccaagcatcctcagagtacaatccagactgcctgctttccaccgagcctcagactgcaatcctagactgccatgctttccttgctggagactaattctctcatgagtattaggaataagtaataatgggttgggaccacaggtgacagtccctggtcttgggcctagaacctccaggatctcagtcctggggccattgaggtgatggatgatgggtggatggggaaacagaaacctgtagatgtgactcatattgaaagttttatttaggggaggtgagaaaataaggtaaagagacatagagatggagaaaggacatgagagaagagggagacaagaaaagtcctctctgccccagaaaaacaatgggaaagagattgaagtaggaggaagtctttgttttaaaggggtcctttacaccttcatgcagactacttagtcatggaaccctgggctgaccagagtactgctgagtgcattctaccaggtgaaaggtgcaggccagcataatgtctgaatccttacaatgagaccctttgcttctcccttttatagctctcaaatcctgggcttaaaggtatgggatcctaagtgctgagatctcctttgtgtgatctgtttctcttttagaccagatcgattttatatagctcagtgtggtcttgaactaacagagatctgcctacctgtgtctcccaaatcctgagattaaatttgtgtaccaccactgcatggtctctatggatagctagtatggctgttgggaataaaggggtgtatcaccactacatggctctatggttgtggctggcttttgcattttgatttccaattgctttataagatgatcatcacattataaaatcttcttggtaactctaaccaagcaagttaaagaattgtgtgattaaaaataaaactttaagtttttgcataaagaaattgaaaaatatatcagaagatggaaagatctcccatgctcataggtcattagatttaacatagtaaaaatggtcattttaccaaaagcaatctaagattccacacaatttccatcaaaattccaacccaattctttacagaccttgaaagaatacttgacttcatatgggaaaacagaaaatccaggtcacctaaaacaatcttgaacaataaaagagctgctggaggaatcaccatccctgatttcaaactgtaatacaagctataaaataaaacccataaaacactagcataaaaacagacaatttgatcaatggaataaaattgaaaatctaaacataaattcacacacttagggagtcctgattcttgataatgagaccagaaatacacactggaaaaaaagaaagcatcttcaacaaatggtgctgatcaaactggatgcctgcatatagaagaatgtaaatagagccatacttgtcacaaaagtgatacattgaacaaaatccatatacaagtggagcacataccccaacataaaatcagaccctctgagcttgatacaaaacagggaagagccatgaatgcagtcattggcacaggagacaactttctgaacagaacaccagtatcatagacactaaggtcaataattaataaatggaacctcatgaaactaaaaaaaaaacttctgtatggcaaagaacaatatttatctgatattttgaaaggctaaagatgggaaaagaattttacaacctccaaatcttatagagttgtaatatacaagatatataataaactaaaaaaatgtatatcaataaaccaaataatccaataaaatgggtacatatctgaatagagaattctcaatagaaaaatcccaaatgactgagaaacaaaaagatatattcatgctgggcatggtggtgcatacttttaatccaggctggtcttgaactcacagagatctccctgcctctgcctcccgaatgctgggattaaaggtgagatcatgaatataagtaacaaacctaatataataaaataaatatagagcaagcctacagccaatatcaaattaaatggagagaaactcaaagaaagtccactgatatcagtaataagataaggctgctcattctcaccatatctactcaatatagtatctgaagttctagctagtggatcaatggaaaagaatcaaagacccaggtgtaaatccacacacttttgttcacctggtttttttataaagaagcaataagacaacaaaaggtaatcaaggggatacaaattagagaggaagaagtcaaagtatagttatttgcaactgatacgatagtatacataagttacccaaaaatttctatcagggatcacctagagctgataaacaccttcaatgatgtgggttgacacaagatcaactaaaaaaaatcactagccctcttatatacaaataataaaaaggctgagaaagaaatcatggaaataacaccctccacagtagccacaaatcgtataaaatatctttggggttacttgaaccaagcaaataataaacctgtgtgacaattactttaaatctttgaataaaacgctgaagaagatatcagaagacagaaagattcccccatgttcatggattggtaagattaacatagtaaaaatggccacctttctagatgtaatctgcagattcagtgcaatcccatcaaaattccaatatgattctttacagacattgaaagaacaatactcagcttcatataaaaaatcatgatagctaaaacaatcctgtacaataaaataacttccagaggtatcaccatctctgatctgaagctctactacagagctatagtaatatacatcacatggtatcagcataaaaacagagaggtggatcaatggaaaagaatcaaagacccaggtgtaaatccagacacctttggtcatctgatttttttataaagaagccaaaaacacacagagaaaaagagaacatcataaacaaatgatgctggcataactgggtattggcagttagaaggatgcaaatagatccatatctatcaccctgtacaaaactcaactccaagtggtcaaagacctcaatataaacagttacactgagcatgatagaagagaaagtggaaaatagcctagaacatgttgacataggagataatttcctaaatagaacaccagtagcacagacactaagactgacaatatataaatgggacctcattaaactgaaaagattttgtaaggaaaagtacaccatcaacaggacaaaacagcagcctacagaaatggaaaagatctttgacaattccacatctttgtggcctggatttctggaggccattgtgacctctgatctagcatgaagtctctgtgaaaacttagttgatcatctggcctttggtggagcaggggttccctgttactctggttggtccacattggttattctgattggtatggctggaacctgagcaatggaagtcccctggggttgggggtagggcctgtccttggggctggctatgagatgggagggtccaggtgatggaacttgtctttgggaacagaatctagggagtggggcagttcagctggcaggtgggttactcacctattctgactggtgtggcctacatctgagcagttagggttttgaaagcctgtattattctaagtgaattaaaaactcaaagcaatgctagtaaaatcaggaacaaattagggctgtttcctatctccacttcttttcaatatagtgctggaaatactaaaaggagcaataaggcaagacatggaacttaaagagatataaatagaaaaagaagaagtcaaataacccaatttttagacgatgtcttctacattaattttcccaaaacttctaccagaaagcttataggaataatcagcaatttctgtaaagttgcagggtacaaaatcaagttacaaatatcagtagcctttgtatacattaacaacaacacattgagaaaaaaggtcatggatatacccccacttaaaatagcatcaaacacaaaaaatatcttaaccaaggaaattaaagacctctacaaagcaaaattataagtatctgaaaggattaagtaagaaggcacaagaaaatgaaaaagcatctcaagttcactaatcatagaataaataatgtgaaaatgaccatcctaccaatagcaatttatagatacgatgcaatctcaatcaaagtattcacattatagactaacaaaaaacctcactcccatgtaagaggaatttcctttagaatggttgatcaggatagtcaaagtgacttccaaaacactatagactgtggttactgctcttaggacaacacacttaggacatattcagtctagatctggcccaaaaggctatttcctgcattctagtttccttagtatcagaagatactaagcaagctttcaagagatgaaagtgattaatggtcctgcccagatgtagtaccttgaatcacaacaatgaccaccatagcaaaccattgagaaaggtagagtaagaggcactcacatcttgtagataacctacatctgtctaattgaacttaagcccacacaacagaaggagaatgatacctgatactagaaactgagcagacttcctgggattagtgaggtcatagatattagaaaagaatccactaccatcactttgctagacagtatagtgcctaacagcattctaacagttatctttatacccacagagaagtatacttatcaccttcattaaaacaacttctttttacagcaaatggagaccatcacagaaaaccactaccgaatacattacagataccaaaggattgtgggaagcccagccccagtggatacatccacagcacatctcttacatctctgtctcacagaacatcacagaaaacagggtagaaagattgtaagagtccaaatgtctgctatgaagtattctctcatagaaatggctgcataacaaaatcttaacaatggcaatatcaataaaaatgctaagtaaaaatatagagttcccaaaccttgattatcaacagctatttgaatatagctgcattgctgtaagtatcagcagacaaaaaataaacagtcagaaaatttgtggaccttgacaagtagactagccataaaattcctaaccctatggcacatcagtcatattctgtcatgtgtatcacctgagaaaggtaaccttgaacctacagagcagcagttctcatcctgtgggccacaaccatcagaaaacacacatttctggtagtcttaggaactgagacatcacacagtagcaaaattacagtgatgaagtagcaaagcaaataatgttgtagttggcggggaggggtcatctcaacatgagaaactgtatcaaagggtcacagcattgacaaggttgagaaccaccgctctatagactagtgagtcattacctaaccccacagccttattttttccacagtcattttgatcaacaaactggtgtctaccatcctgcaataaaaatgaatagctactggagttaccaaagggagaaaagagattatttgatcaaattgacatacagatgtaaggtgaaattaagtgttgctagaacattactttcagaaaaaggccaatcaagttgatcgtcttcacagcatgtggttgacaagttgtctagcccttctctgtgtagtcctcataccttgtcttagcaaatatcactgaaagcaacaaaatgaaatattattttggcatggggtctgtgtgaagctgtcttctgcgggaaggtgcgtgttgtttcaacagccggcagtcattttgatgtgcatagctcatgcttcagaggtcagtttttccccaaagcagcagctgttggagttttctagtcggactgtttgctgtctgcaaacaaagttcccattaagaggaagattctaagtgcatctctccaagagaagattgcactcatttaaatttttctcctggcctttttccatgagaaggaaatttggggctgctatagagacatgctatggaaattttctcctcccaacagatgccatcattaagttgaatacaaatttctagatttaaagagagattggatcactgcaaacagtggagtcttgttacttgagtctgtaaacaatcagccctctttattatttaatcatcagaaggagttttttcctttcatgtaaacgaagatgaaccatagaataagaattagatggcataaaataacctgaaatgacaggtcaggactaatctgaaaatgtcatgttttcatccttcacaaaaagtaactaaagtaaaccttaatagaacctcttcagcacaaacagtgaggagcagaaattaaaagattgtggttcagaaatgcataagccttaatgaaagtgtgtgttgcatgcttgattgctgactaggctctgtcccctggtatgctctctgacctcttctgcaaataaatgtctccctctgctccttcagttttccatatgacatgagtgtcaagattgcctgaaaaattataaacaattaaagtgatgtgaggaaaaatggaatggtctcattaagcatcacatatctgagggtggaaaagcctacttcctcctttccctgtctttgcttaaaagaaaacgcattcagaggataaagcaaagatgaaataacatgtcagacatgagactaaagtctgcttcagagttcccagcaaccttaactcagccttgtctagaacagagagcagcagcagagcctttgcagtggctgcactctggacactggtaggatggaaaactaacctgaggtctgatgagatgaatcaaagcattctttggcttataattagaaaataaatgatggatcattattcagcaagtgttttcttcatgattactactacactcttctctttacctgttagagataaataaaatgaagtcagaattacagaaatagcagtaggttgattttgggggtcttggttaatttcagagctaaaatttgaatttgaaattacccaggccaaaacttgatttacatgaggaatcaggcgattttcttggtccacaaaatgggtagaatcaggactctggagtgggtatttcaaatttaattttaaattatttgacaagtgagtatgcccttagtgatcaaaccaaattgattagtaagtgcttgatcatagatatgaccaagctgaattaaaattaccctgttccctgctgagcttctcatctgatgtggcagcttctgataaagacttaagttcctcattcaaaacattttttcaatttgggctgctgctctttgaaactcacacttcctagtctgtggtcctggaagcttccgtcatcactgatgccttgctctatgtgtttgagagaaatgagtaagttgctaaaaatagacatgtacaaaagctttccagcagggacaagaagcctactatgaaagtgttccattgtcctactcctacagcattctctaccaaagtcatatatgctatctttcacttttttgcataggatataaattaagatattgattacctatttaattttttgtcagttgaaacctaattctggtggtgaagaggttcctgtctgatcctaattagctggatgactttaagtaaagtatgtaatggctttgtgatttgatctcctcacctataaaatgaaccatagcaatacccacctgcctatctatggaaagcaaagatatcattaactagaaaatgctttgtggaattactagcactttcaatggtaggatgaggatgatgaaactgatgattaatgtaacatgactgcttgggttctatggttgatcagatattcagtaggactgccagtctcaggataataccttttatttctctaacagtgtgctgcttttatcactccctgagtcatatttgactcacagctagatttcatatgttgcttcctggttgttagaggctagaatcttccttcactattagatttctgtgatcttccaatccccacctccacccctatcaatccagtgtgaaatggtcatctgctgcagcctcaggaaagtccaagaagagcagactagttcccatggatacacacaagccttttgtgccgctatgtttgcatttctctttgagcaaacaattacccaggattgacaggatgactgctagcttcctcctcctaagtcttccacaaaggatgctgaggtaagagatgacatagagacaggatttggttgcagtgtgctttgcaaagaggctgagtcacctatttatattgattgaagtgactgaaagtacaagcaaaagtgccaggcacttatgagctagtcatgctcactcataggagtaaaaactctaaaaacaggaatgacctgtgacgtcaaacaatttatgagcaaaaagaatgctgtgtcatgagtcttcagtttgaggacaaagaggaaattgttcagccctgaaaacacgtattttccatttttatttttttaacacacgtgacatactaatagctactaaataaaattcttgctgttgtaaagtgtccagcagacctgctagaaagtctggtggcatcaacataaaggcacaggcttttcctcaagtcacttataactttagcattcattgactaaattaatattcggcctctttttctttcaccaataaattcttgacttcagaagtagaagtgactgataaaatcatctttttacaaacacagttttcaaaattcatgtgtcaacagtctgacttcagagtggacatgggcacctcttctaagtttctgtaattttgagtttgacaaaatgctgggcgctcagcagctacccttagaattcttggtggggtgctctcttacataattttaggacttgaacaatttgtaaaccttgtcactgtggattacagcaacacatctgaaggaagactaaatttttaacttcctatgcactaaaaggaaatatttttctgatacatttctactgagaaaacctttaagtaacacttaaccccttaaaactttacgaagaactacaagagtttctcgttttagattcttgatatatattcaatgttttctttttatttattttctggtttgccatttcccccacacttattaatgaccaccagcttctatgacagaaaaatgacagctatctcccctgctccttacctgaactttttatttttttactatgaaagattccttgctttaaaagttttttaaattaaactttgtcatctccagcatgattttctttcttgctgactttgcaatgttagccacagtataaaaacaaatgcacaaatgtagaaacttgaattggtcctcagtttgcttacagataattgctttgctgtctcttgtggagtagtacctactaccattacaacttggtactgcaatttgtttatcatgcatagctcaggggaaggattggctaggcttggtaggaggtctcagtaggcagcagtcttaggctgtaaacttcctggagtaggaagctgcagatgctaatttttgtacacactgatcaatagttgtaaacttagctatgagacaatggataataattctgatctattcaataaacaaaatgctttaagatgtctttagttcagcttcacacatgaaacatatctttacagaatgcacaataatttttagccaaatttctttgagttcattccaagaattattaagctggtttctggtttcttttctttctgagaagccagatgctatctaagcattgctactttgaagcaatatttctttcttctggttgtactcaaaatgcttttactcatcttggaatttttagctactttatcactgtaatcatggatttttccacaccccagtttcatctgattcttgattttatgtctgcttttcagaaaattcttgttcattaattcttcaaaaagtgtgtgcgtggcatatttttttcaatcctctcatgcttggattctaggtaattcatgtttcaccttcctttgtataatgtcacattttatatttttcatcattgtgatctcactgcttcagtttgactatgttcttctgtcctgcttttcaaattatgaatttttctcttcagctgtgttgaatttgtcattgagtctatccattgagtttgcaataatgtggtgatattttgtttacgatctaacaaataaagcttgcccaaagatcagagtgcaaagctagccacagccatagaggccaggcagtgatgatacacacctttaattccagcactcaaaagcagaggcagatggttctctgtcttcaaggccactctgggctacaagaaagttaatcagtctaaaagagaaaccgagctgatagctttgatctgagcacttgggatcacatgcctttaatcccagcactagggaagaggagacaggagtgatatggctgggtgtagagaggaatctaaggcaggaggagacaggaactctgaggctgcattctgaggtttgctggagagcagtggagtctgaggagcaatgcaattggaagcagtctgaggttcaatggatcaccccttcggcctgagcgttggtagaggtgagaactcttgaatagctggatgctttattttctgaacttcagttttaaccccaatatttttattggggtttttattggggtttttattattaagaccaactagaattcatgccacacaagatgagtcattaaatctttctatctactaattcccatttgagtctgctaaatttgaatcttatcttcttttaacttagtaaacacttacattaatattgtctgtgtctattatatctgtgggtttctttcttttattggttatgttttgtgggtactgtttatgtgaatttgtattcccaaatcagattttcttacatctcttctgattattttctttgcaagtcacttacagaaataatttgagatcatagaaggtatcctttcccggagagaaattaattacctttgcttctgcttctctgaaatgaccttcacacaagttcagaggcagaacatcagttcatctttcctcctaatatgagccagcaaggagtccttctgcctccaaccctgggtaccagtactcatctcttcggcatgagaaaggaaagaagggctgctccgcctccacatccttggtcccactgtatagtactgacaagcagcaacttcagtttgcattttcaaggggaaaatgaacccaagtgccaaagctgctttgtacaccctaagcttacctgagacctggatcctatgtaataagtttacttgttttctttaaggatatatttttaaataccgtgagcaatgtataaaattttccttaaaacaaaatttgcttcaaaccgcttattcactttctaaggtctagttaaacttaactttctctacaaggttctttctggcccctcctctgcaaggcagaaaaaagtgttttcaactaggtacacacagctaacattttaaactagaggtcagagaatttctgtctccatggttatatagctatgcctttgtaagagaaaacaaacttagttttgttatacccttgtaaaaattcttccctggtttaccctgttggtactttgtaaacatccatgccctaataatcctactaaaattatttacaatggaaaggcatagaggaagacatatgactctcactttaataacaattcaacatgtcaaccatatcaagcaaagcattttaagccattgtaaatttgtttcaagaccaacattgttttgtcatatgattgaaaacacatacataaagtgaaaacttattcagaaaattatgagtaatatatatatagatatttcaagacaaaggaaaaaatgacaacttccctttagatgtagaagggtcaggaaatgagtgtgggagatacctgacatcaacttcaggcctccacatgaagatgcataggtgcattgtctaccacacacatgcaaacatgtatgtacacacaaataaccacacatacaaatacttgcaaaaagtaaaaaataaataagtaaaggaataggcagaaaaacttgaaactagtcattgaaataatagatatttattttgtttctacatatttaaaatacccatatcctatggtaaagtaggttgattgatcaattattgtgatagatagatacatgattgatagatgatatgtatttagaggatagatggaggacagagagatatacatgcacttatgttttctataataaccgtaagacaatctcttactctttaacttgaattgttttgaacccattctctccttcaactctattcttcaattcctgtcatctaaagttcaggatattcataaatatgccttagttatacatgttcatggaaattgcctcttttgaatagaaagaaacattgctgtacagaaaggtactctgcatactatcagaagaaaatttaaacaccaagtcaaccataaaccttttatcaataatggtgtattacctgcaagatatgctagggcaatagttgcacaaaccttctgggagtaatcaaccaacaactactttgacttaaggcccactccatgaaacggagcccacatctgatactgcttgcgtgaccaagaacctgagacctcagcattattttcaccaatcaacagagaaacttcctcctacagcaaatatagaggacaaaaatagagacccaaccaaaacattattcagagagtgagagaccttggaacattcggccctgaattggatatccccatcaaatccctccactcggagctcaaggaaacctgcataagagtaggcagaaagactgtaagagccagagaagatggaggacaccagagaacaagacccttgaaatcaacatgcacaaagttcatttgaattcagagtctaaagcggcatgcatagggcctgcacaggtctgcacaaggtcatcggggcttacatatggctccagttcagtgcttcctggatgtatgaacaagtgggtctctgactcttgtgccttctcttgggctcttttccttctgttagcttaccttgcccagcttcattgggatagtttttgttttgttttattgtattttattttgttatatacatttttaaatgaatgaatgagtgaaagaaatcctgtggcactgtggcaaatattaacaactgaactgtcatttataccttctgggagagaaaaaactattcagttttctccgcttaagttatatggggtatatcaaccacttcagggaaagcttcctgttaaggagtaaggagtctctctcgctctctcgctctctctctctctctctctttctctctctctctctctctctctgtgtgtgtgtgtgtgtgtgtgtgtacttttatttggttacagtttggtggggtttggttttttgtttgttttgttttggggtagtagtgttttattttattttcatggtttggggagcttttgtcgtattaagttgtttccattttttttttttgagaaagaagttaacattggaagggtagggagtgcaaaagttctgaaaagacttcaaggaggggaggaatgcatcaaaatatacttaaatttaaaaagcatttttcataatttaaaaaataaataaaagaaatacattatggttagagattgatgaaagtctttatctaggtgttctgggttggatatgtagtcacatctaagatatcacgaggcaaaaaaagtatgtgaaattaggtaaatctatcacaggacaccaggttctcataaatgccatggaccacagtatggttaactaagaacatgttttaactaaggcaggactatgtttctgatactctggattcatgtataacttaaaaagacattagaactcccaaggcaatgctggtgtgcctctccatcgtcctcccccatctgtcatattgaacctgaacaaatgccccctggattaaagcattcattttcttcggtccttcagacctgctcgtgtgtgtgttactgttgccagatatgaaaaagaaacaagtgcatgtgaaggcagagggtggtgtctttgtgtaaggtgtccaagtctgtgtgtgtgtacatgtttgtgttagtgccataagtggagtgtgcgtatgggtgagggagaagggacgtgaagttacaatatggataaaactagagttttaacttcagtagataaatttaacaatttgaaaacagaggagaaagtaaataagtaaaaatagtacactttaaaaatcccaagaaccagactttcaatttgcacatatatctaattagcgaagtctcatgggctgatctaagttaccccatggcccagaagcaaacaaaggaaagagtataaatgaccaccacctgctgatagaatatgagtgggagtttctgaaggagctagactgtggtgaagcttcgtctcttgactttgctgtgtcttaagaaataaactccacaggactaaaaagtagattggtctttctacctccattactatgaccttgacttcagaaatgggtctgtatcaaactgaaaattaggtcattttttgcttgttttttcatgctctgagtctacttttagattatttaggcttggacctccctactctcccaaacttacacttacatccctaactcttctgagtcacttaacattttaaaatcaccaagtgagtcattggtgttaacagagttaaataagccaacaatggggactgtctctcttccattttgagtggaaaatggaaaatattctgttattttaaaaatggtataattttattattccgtgctggtagtggcctagatcaccagttcagcttgctgattattgccgaggcaggcacagggaaattattacaaaactaaaggtggtatttttggaaaccattatattgcttttaattggtttataaataacaacccccacaatgaattaccacacttagttattttggtgcctattagctaacagttaatcttagagggttacgctgggaaacagcagtactgaaagcttgccactttgtacatactttatggatagttttactcttgtccaggcaagcatatgattccacctgccctaaaattcttcatgtataattatttccacaataaaatatgacacacacatgggagacctttattatccatttttgagggcactgaagccaatttgaacaattttctgagcagaatcttagttccctagcatgatcttgtgcaagcagagatagcaggtacacatctctattagatttcttagtttcccctggagtcaggcagctttcccatgacttgattattttctagaaatttatgtacaaagaggaaaaatcaaagagttacatgcaagcgttcctgcggagtataatctgtaactcagtgccatgtatagaagccttgaaaatctaaggaaggtttagggacagattttcagaacatctccccctgtgtcctctgtactagtcccagccccgtcaggaggaattgcttctgtgctagcgagaggtcctcacctgcacttagtgcagagatagaatatgccatgcaactgactacactattttgtacattatttattataccactataattctttctcattttaagaactggtgaaaccctataatttattttccatcagcctttttcagtctttttctgcctcctgtcttatcaccagccccaaaggacagatgtttccattcttggaatggaatctcttctttcattggccattggtttctagttgatgccatgtgacaataccatatgcaagaagctgtcttcagccatgacaacagtgaaagtgaaaatccttttctcccctaccttccctttccttctgtacttgctacctttggtacttggactataaaatgatacctcgctaataggaaatgaaatgctgaagtggggaaaaatgcaatgttctaaaatagagagcaaactgtgtgaaaacacgtcgtctatttctttaaaagtcgctttaaatgtattgttcccatgcacatgtgtgtgggaatatgcacaaatgtataaataaacactttgtgaagtagatcctcttacctctacatgaattctggggagcaaactctgccaggttggtatggcaaatgcttaacctactgaaatatctcacagctactcaaaccataccacataaaaactaaggcatcaaatactaacttccactacatacctcagctgatattcataactgtgatggaactccagatgaaaaccctccttatcttcaagctgagaaataggaattgtaaagaattaaattatttttgtttcctcaggtagtaaagtcacagaagtgtgtaatgtttgctttttcgtgctaggttctaaaaatattaatttttattcagttttgtgtaggagcttattctacgcatatgattttgtttgagatcatgtctttattcctgactttattttccaaaatcttacccacttgtctaaacattcagtcattttttgtttgttttctttctttcctaatttgccctacttatggaaaatgttctctatagctcaataatgagatagaactgaccactactatatatggataaatgcatcctatctgcatgttccctgaagcacaaaaactagctaaagatgtagctgaaaacacttttcagaggtgtaaatttacttgaccacaaatgagaataaaggaaggtaaaacaagtaagatataaaatgatcttttcgcagcatgcagctagtaaattgcatctgtttattgcacagatctccaggcagagtataaagaaacaccatggagtttggagacccccatggaaaatggacaggaaggattttacgagccagagggttcaaggacaccaggagaacaggacttacagaatcagcttagcagggctcataagggacacagagactcaagtgacaaccaaggaggctacatgggcctgagctagatcctaggcacatacgttatgggtttgtagcttggtgttcttgtggcactcctaacagtggaagcagggttgtctctgactgttttgcctgttctagggacccttttcctcttcctgggttatcttgtccagtcttgattatgagggtttgtgcctagtcttaatgtaacttacgagatgttcagttgatatccctggaagacctgtccatttctgatggacaccaagaaagagtggtggggctgtggtgctaggaggagctgagggaaggaaattggatataatgtataagataagaataaaaactgttccatgaggaatgaaaaatgaaagatgaaagaacctaaccttcctccagtcttctattgttcttgggtttaggttactctcagaagaataaactgtataaactgcatttggctccaataagaaccactcagggcaaaaataaaaaaataaaaaaataaataaaagaaccactcaggggccaggcgttggtggcgcacgcctttaccccagcactggggaggcagaggcaggtggatctctgtgagtttgaggccagcctgggtctccagagccagggccaggataggctccaaagcgacacagagaaaccctgtctcaaaaaaccaaaaaaaaaaaaaaacaaaaacaaaaacaaaaaaaaaacaaaaacagaaaaaacaaaaacccactcagggtttgagagaatgatgtatcttctggtgttacattccatccaagttcagatataacgaaagaacacttaagtaattaatagagaagtaaataagacataccagcctttaggacaaaacatcaacttcttgacctactaggtaggtagacaatctttctttttgaacatgaatctcacatcatccaataactatttgaatcttgcccacatattgcctgtcttggtctcctttgatgcagggcatcaataggcttcccagcttctagttaaaattagcaataggaacgcaaataaaaaataagacgtggaaaaagaatggcattggggtgagtgctcctgttgggtctcctgtgtctgtttgaaggtatctatcccaaggtcatggtctacttgatgaagctctacagagaaggttctttattttctgggttctagcacccactctgttttcatacctcatggtggcagtagctccttgggtacacagcctcagtgtactatttcttgaagttctttatcaagcttactcttccataattggttccaatgtaaataggttttcttggaatattcctaatttatgcttgacatctgtttcctgttcagactctgattggaaggaaacaaaacagggtataaactacatggaattcctagagatctctccctctattctttcccattgctgtaacaatctttcttgtctttattggcctttaatggatgttgagcttttttgtttcttaaaggagtagtattgtacacagaagaagtacatctgcctcttttatcatttcttttatgttatataactttcatttttttctcacatttatctaaagaagttccatagccaatggatcaccaaaggatctgccaaaatgatgcttgatgcttcctctatgtgtcatcattgtagcgtaataaatgagtgcctgtttaatgactaattcttttccttctcttcttctatatatcactggttctctttggggctgatggatcgtcctgcatatcagatatttcattattattcaaagcagtagcaaaactacagttacgaagtagcaatgacataattttatggttggaagtgtcatcagagcatggtgaaggaactgcactaaagggtcacagcattaggaaggttgggaaccactgctctgtgtgatctttaacattccattcatccatttgtaaagtagggtaatggagccaacaatatcttccaggcttttcaacacagaatgtctgtgtgtgtgtgtgtgtgtgtgtgtgtgtgtgtgtgtgtgtgtgtgtgttttcttttaattgggtctaaaagagaaattgaatacatttattttacagtgttttatgcagactttatgggacaccacacagatgaatgcatgtgtgtcagtatgtctgtatgtctttattgatgaagcaatgtgtaggcacacaaaattttatttttgaacttggtatcgcaacagtcttgtgaaacatagttttagaaccagataaaagtgtgaaagttcacaaaaccccagatcttgctgtatgaagggcattcatcacaggttatcattagcttttcattcccagtaactcatccttccattaatcacatactatctgactgattaagttaagaaaacccaccaaaaatataatcattcacactgactttgttaactagaagagatgaaaatgaaatcccccaaaattaagtgcctcatctgtgtatgcgtatgtgcatatgtttgccaacagtatacagctgcatgtgtgtgggagtatacaagttcatgtgtacatgaggaggtcagaagaaaccatcaggtgtcatacctgaggtgtgatccttttttatttttttagacaggatatcttgcagggttggagcttgccatgaagtctaggctggctgattcataaggcccaggaatctgcctatctctctctccctagcacagtgctaggatgacaaaagctcaccaatgccccctggcttttttgtttgtttatattttaaagacaagtgagctttcatttattaattttatttattcaaaaattccatacatgtacacaatttatcttgatcacatcaagccttcacacctttcctccaactccccatggaatcttccaaaaatatctgcctaccaactttatgtcctaatttgtctgttatcctctgacttcatctatctctggtcatatatgaatgggcctttttgtaccatgagtttttgaattgagcccaggtcctcatgtttgcaagacaaacccttaatagactgagacatctcaccagccccaatttcccattttaacacctacttcaactgagtagaaggataaatgacaactgtcaattgccaacttgatataacacatagtaggagagaactcaatgaatactattgaaaataatgaaaattgtttttatttgccattgtcaagcaaggcacaaatcactactctcccttaacccaattggacactgtatgagtatccatgcctgaatggggggacctctggcttatcatcatgactcttgcatgctgtaccccatgtgacccagagaaatcatccaaatatacctaacaatataacgcatagctggataaaggagtgcacccctctgctaccacttagaacagatgcagtatatattgatctttcctcctaaagataaaaagttctacaagttcaaattcttagtcttatataaatgaacatcaaattagtgatctaattttctaaagtaaacacttaattgtcctctaaaagtatatccagatgcaactaagtaattacatatgcaaaaacaataatttgcaagtgaaattacttggttgcatgtgtgaggacatattttacaggtgcaatttaggtgcaaatttctgaaattttgaacccaggcagtcaacccgtctaacacatttttactgtgatgtgaggaagaaaatagaaaagctgccttggttctgaaagtgtacttgtatctagactgctatagcaagtagcttaatgcctcagggtatttgggcaaggggaattaaaaataataacagagttatttcatttgggagtatggttcttaacttaaaagttacttgaggtttaaattccacactttcttcaccagctctacagtctcccagggattatcttcaggcaaaatcaagaagggaggaaatttatcaggaccccaattgttttctgtttttgtttcctttctcctaccatcaaggtcatgcctcattctgaaaagtttccagtaactatctggcttgatgaaccagttcacagccattgcaccttatattttaggaattttgggcctttgagacaaaaatcatacttgatctacagatatgaaaacaatgctttgtcggtttggggagaataataattggtgcatttattagtatcacagaccccacaggccagctactagagatgcaaatcctgatcctgggtggcatgattacacacaaaaggtgttgttttcagtaattagtccaagaaaccctggaccaaatttggggaaataaccccttaaatctctgggttttgtttcccaagttgacctttaacacaaaagggtgaagtaattattaatagtggctatcaggtggtaagtttcagcctaaaaacgtaaaaaatacactattttaagccatatcactgcagcgatcccgtgtagtagaaggaacttgaatatgaagcacgggattttgctttcaaaacacgttcctccatttggggaacatccagaaatgagcaaggtcctgagctcactggagcagtagttgccttataaagtgtcttaactttctctccaggttactgagggtgagaagtcagcaaggaaaagagcatcttagctctgcatgggaggcagggctctcctccctctggaagtgggaaggagctatgcatgagttcacagagcatggaagtgaccaagtatcaggaccaggttttataggacgaatgaaggaggcaggattgatgagctgtgcacaccaaatccccggggccagaccagcacaaagatatctaagcactcccagaaaaaagaaaaaaaaaaaaaaaaacactgagaattaagtcaatgcctagcaaaaacctgaatgaaaatgagagtagagccccatttggttgatagtgagggcataaaatctgtgaattggggttccacaatcattaaattcatgtctaaaagacacaagaaagttttccttattacatggctgaaattgggcatgagcttcaatccttgaagtataacatggtggcaggatagtaacatgcagagtaggtcaacaagtgctgctcccttcagtaacaaccgaaggcaagaaattctagaaacaatagcaacagtgtgcagggcatctgtctgggcttctgctacagaatgtcagaaaaactgtcttaaagaaaagtaaaatgcatggtttaatgctagtcattataaaaatttcatccaacacgactcctgccctctgaaaatgagtaagggaggtacctggaggaagatgctgctgaccagagtttcagtggaggcagagttcatggacagaggaacactgagacataactagaggaagatcggccttgcacaccagtttaaggatattggaaacactttccgccaagtcatctgacacctccacagagccctgaagctacatgcaattctgttcctctcccaagttcatcagaggaataaatagagatgattctgaaagaacagctcctgatccattaactgctctctagggaaccattcccgtgggcgtggccatgaactatacagacataatctatgcttcttactccctcagcaaggctgatattactgtacctattttagacaaggaagccactctctagagaagttgagggacaaatctagaataatatgagggcctgacactagcctgaccccagaggctactctggtccacagtcggccccatggctttccatgaaatcccagagcaatctacttatcaacacagatgccttgcctcagtttcttccttatctgtctgaagataatctctccaccattttcacacaatcatgtacgctgctacatatgttgtatgtatctttatttcaaattaatcaacgaaaaggaaaatatgtggaaggtgatattggtgaaaatgtcaggttttttttttttttttttcccttgatttctcttgaatttactgggggaacaaacagcctgtagatatgttcccaatttcacatttctcagtttccttcttttttagccttgaaccccacagagatgtatgtttgtaattttaaaaaaaaattaccttctgatactaagaacacaatgccaaatattgtctggagctgctcgaaatagaagcttaaaatgaaaacggcttttactacacctgcagcctcagtactgcgacacattactgtagaaaactgtgccaaatttcaactgaaatacctttttcttttcctatgttctctacattgatctttccttctattagttttgctaggagtgaccaaatattatataacaatagtcagaaagatcgaatgcttttcatcctcatagctgagcatttgactgtcccaagataaatctgtcttttactaatgaaaaatagatgcttagagaggtttatccatctcgcctgaggccatgcagagcctgaagtaacactacaaagttaattgtggaatcaagtattcttctgtccctggagtttatgcttaggtatctcaactcttaccagtattttaaaaagagtctttttttttcagggcacatttcctcgtaagcctagtacatttgttggaaacttctcagaggcaagaaaagttctcttggttcatggtagctaacaaactgttcctaatatggatatttgataattatagagattgtcctgtttgctgtctcttcttagaatgtatttagaagtgtattaatagtgcttaaatgtctacaagatgacaggaattaaaaccataagtaaaaaatagtgccagaggtacggctgagatacactttctctcctgcaaaaatatactagctgtaggtcccacatggtcttctaaacccagtaatagcaagtgagtaaggggaatttgaacagttctccctttgggtcttccaaattgactaacagctgtagacaagaaggccttctcttgatgttagtttccttccaaagaacaactgaataggtgttatgttaatgattgccttcctttagacttgttggttcattttctacctctcttcttttaggagtttgatatgtcaacttgctaacaaaattttaacattctaaatagtttctctaatttgcaaatttgaggttagcaacatcaaatcactgaagtaccatcattcctaggatataataattaagtgatatcaagacttctaccctgtcttcctactcctcataatctgtagaattccacaactcttgcttagtctttcttgcaaaatttggatttctggacaggaattctgtagtaaggatagaagacagtagtgcctgccacctggtgctcacagaggggagatctcatccacacctactgtccccacctctggccccaactggcatcaaacacagaatcatttgtaaaaggaatcttgctaataacttcccaatttaccctcctccaatgcttcatctgacacttgttttatcagtttccactggtaaacaagtcaaatgataggagaagagtcacatgttgtgagtagcccctcagttctggccgctaccaactccagtgttaaaataaagatgcaccaaagtaaaaatatttattgcatttttgggcattgaacattgaaaggattccaaatatcgaggaccagggaggaaataagcacagatgccgccatttggtgggttgttgttgttgtacattttagagacaaaatacagtaaatgttttacagacatagttgcattactatgcatcctctgacatattgtgcttgtcactttattatttagcatttatgctgtattttaactggcctatattatttttcacaagcctactaaatagaatagttttactcctgtaagaaaactggtcataaatgccaaatgttgctctttcccacttggaaagttcttacaaagggaagctcagtgctttgtcctgtgctgtctatgccattccacacaatgattggtaacaactcagagtatacgaagaagggaaactgaggtggaaagcagaggtcagccatggagctttccactctaggggcagtgactccagagatagaacaaagattgccataatgtgagagctccaactttgaaataaggatgtgccgcagcgtgtgtgtgtgtgtgtgtgtgtgtgtgtgtgtgagagagagagagagagagagagagagagagagagagagagagagagagagagagagcgcatatgtgtgaaggtgtgcaattggggacattgaatgttaaaagggttccaaatatcacagctagagttaaggtgattacatagttgaattgatgaacacattatacgtttgtgagggaccaaaataattccgctatggaatattttgagatctagccttgggtttcaccaaacagaaacaccagaaagctcctgcccactattgtattgttaatgccagtaaggctactattgtttaccatggcctcagggtaatatgcctcctagttttgcatctctattaggcctaagcatctaaataggcctgcacctgggtggaggtgcgaggtgtgtgaatgactagggaagacaggagttaagggcgaacgaccagagaggagagaataaagagagaaatggttccctcttggtaatggcaagatggttaagaaacagtcgtaaagataaataaaaaaaaaataactctagttctacaacatgaaactaagagctctctaaaaatgacaagatgcctatatttggtctttatagccactgggttgctaggagtttccaggtccacacacccctactcaggccgaacctcatgggttaaggctaagacatgccagttcacaacataaataataatcatttagcctactttcatacaagtgtgacactagggagacaggaagagttgaggagagaggcattagaagagaggagggaactactgacagaagatgttctacagaggctctcatggtccatctcagctacccatgcacatgctgcttagggtagatcgctgagtacctgtctagtgatgaagacatgatcataccttagtgtgtgtgtgtgtgtgtgtgtgtgtgtgtgtgtgtgtgtgtgtgtgtgtgtgtgtgagagagagactataaatcatacgttaaatgtaagccaactgttttactgatgcttaattaatgaaagcacaaactgctcctttatctgagaggaaaaatgtgctgtgtggaactcactgagcactagctgtcaattactgctgtcccatgaatattgtcctgcatctctactgataatggttgggagtttcgagggatttgaaaggatgacaatagctatttatgatttcaactttttatcctaagttcaggttccaagacccaaagatatgtaacacagatgcttaagttgttctgggaaagattaaagtgtgacttcttgcttcttgtctgtgtatcaggatgtgcctgagaaaggagaaggccttcaaagtgtgtcttaaaagtgactagatttgtccagattaatgaaaataatagttcatcttaataaaaggatttacagagcaatatagagaggcagaaatattataaataatagcattttctaaatggtctagctgatttggtgtggtcaaaggtaaagttgcagacagaaaagcagtgttagagctttgtatcttacacatcaagacatcagagacaatgtctgaaaaggaatatctgggaacagcaaaaggatgtctggtggctgaacaaaatgaccaagcagatgctgagttaagtttggaaactcttccccaggttcgtgcaagaagcaatgaaagattagactaacgcgctggcattggaaggcaatagaatgcagttttaaagcaatgctgaagtcaaaaatgacaggctttgctgacagattggatgcagaagatggcgtgattcccaattcaaagatatctaaaaagttgatttagtcaagctccgaaaaagtatttataaatttgctccaattcataagaagagcttgggaattagagacacacacaaaaccagtgacctcttaatgacacagctgaaaatgactgctactgattttgtggagagtgtttattagaaacactcatataaaaccagtgcacatttattataaaacaataattctttaaaatctcacttacaacacaggccaagatcctagtgtagggttgtacttagggaactatggtgtagtttagaaatgaatgtatagaaaatggcatctactatgctagtcatctttttcaatgaaaaatacaggacataaaattatatttctcttttttccttatcatctgtggaaagtaaaatcagccttaccatgatatacatacacatacacaacatacacacaaatatctctctatatagatatagatatagatatagatatagatatagatatagatatagatatagatatatttgatgaggccacagtattctgatttctgatccaattttattctgggtattcttgtaaagatctttttacttgttgttgatatttaaattagaaggccagaaatgagttgaacagattatctgtttaccttttaggtgattttcagttgcaggccataatagaaatacccttcagatatgtgcatgtgtgcatacatttccctacaaagccctgatcgatacacttagttatcctcagagaaacttctgtgattcattttgtaagtgacagcttctaaaagaaatagcctatctaccagatttgcaacacattgcatatgttaaaaggctgagaacagagctacaaggtcaggtactctaacaagatgctggataaacaaagtggagctgaggttttaatgaagggtgatgagtagctaaacttcatcaagaaataaaaaagaaactgaacatgaaggttagggcagactagatgtggaagaggagggaaataataaagatgtgagaagcctagaaaatttcatattgtaagctgcctctggaacactgggaaacgcaaaaacagaattggtctgcaattcagaatgaagctataaactcttttagaatacaaccactttctatttcttcaaaggtttgatgaacatatctggcccaatttacaggactttgtcatgtgacaaaaacaatctacatcacctagagaaaaaaactggctagtagtaggtagtggctcaaccagccctcaccctgccctttgatagcatggaacctgatgggccagatttgtattgacatttggcaaagtggagcaaaagccacctgactcaagtcatgagtcaaaggaagcattttgtttgcaggacaaaaagatggagaggtataagaagctctgtaggtctctggggaaaaaaaatgtatcagatgccaaatgtaaatggagatagcacagttttatttacattgtaaagaattataaatagtgaaatactctataagcaaggagaggttcaaaagcagcactgagcattgcttgaatcatagtaaacctaattcctgtctacacttcccaaagtactacacagttctacagaatctacatgaaacctcctcccttccattttgtctttatgtacttgagtatgacagtattgtctctgtaaatgttcaacacattgtgtctctcctcatacagattcttagtagtaaccactgatcctacatggttatgaatacttaaaattcaaagatgctttatatcataaattaatcagaaataccactcatatctgaagttcaataacctaatattaaagtatatcccattatatcacctagttttgtgagatctgcaaatgagaatactggcgagttttatagagttcagagatcaaactagatggcttaatctctgttccaatcagagactgttaagtccatggaggttcttcaaaatgaaatttagtttataccctaaagtcatatagctggttgtgtgatgatccatttctagctttttgagaatcctgcacactgactttgatagtcactgccccagtttgtacactcatccacagttatagtcatttccctgaccccatatcttctctagcacttgttctcattttttgtgtttgtttttgttttcctttgtttattagacatcctgacttagtaagatcaaactataaaatagttttaatttgcattttctgatggctaagaatgttgatcattttaagaaaaaattatttttttaatttttttatttaaattaggaccaagcctgttttacatgtcaatcccagttccacttccctcccctcctcccttgtgccccatggaccccccatcccttcacctttctgctcccaagggagggtgaggccttccatgggggaacttcaaagtctgtcatatcatttggagcagggcctaggccctcccctgtgtgtctaggctgaaagtgtatctctctatgtggagatataggctcccaaagtcctttcatatactagggataaatactgatacattaccagaagccccattgactgcccaggcttcctaattgacacccactttcaggggtctggatgggtcctatgctggtttcacagctatcaatccagggtctatgagctcccccttattcaggtcagctgtttctatggatttctccatcatggtcttgactcctttgcttatcactcctccctctctgaaactggattccaggagtttggctcaatgtttagctgtgggtatttgcttctgcttccattagctactggatgaagaatctaggatgccatataagatagtcatccctaacacaaaatatccaggaattatgggacacctggaaaagcccaaacctaagaataataggtatagaaaaaggtgaagaaatccacctcaaaggcacagaaaacatattcaacattaatcaaattgaaggctgaaataaagtagaaactagaaaaaacaatacaaagaatcaatgtaacaaacagttggttcttcaagaaaatcaacaagatagacaaaactttatccaaactaaccaaaagggagagagagagagagagagagagagagagagagagagagagcaaaatcagaaatgaaaagggggacataacaatggaaactgaggaaatccagagaatcatcaggtcatactttgaaaacctgttccacaaaattcaaaaatttaaaggaaatggacaattttctgaatagatatcacttaccaaaattaaatcaagaacagataatcagtttaaatagatctataacaccttatgaaagaaacagtcttcaaaagactcccaaccaaaaaaagcccagggccagatggttttagtccataattctaccagaaatgcacagaacagctaataccaattctcctcaaatgttccacacaatagaagcagaaagttcattgccaaactctttttacaaagcttcaataaccttggtaaacaagccacacaaagacacaactaaaatagagaactacagaccaatatccctcatgaacattgatgcaaaaacactcaacaaaatattggcaaatagaatacaagaacacatcaaagaaaacatctaccatgatcaaataggcttcatcccagagatgcagggatggtacaacatatgaaatccatcaatatagtccatcatatagacaaactgaaaaaaaaaaaaaacacatgatcacctcactgtatgctggaaaagcctttgagaaaatcaaacatcccttcatgataaaggtcctggagagatcagggataacaggaacatacctaaacataataaaagcaatatacagcaagccaacagccaacatcaaactaaatggagagaaactcaatgcaattcctctaaaatcaagaacaagacaaggctgcccactatctttatatctattcaatattgtgcttgaagttctagctagagcaataagacaacaaaaggagatcaaggagatacaaattggaaaggaagaagtcaaactttcattatttgcagatgatatgatattttacataagtgacccaaaaacctctatgaggtaactcctaaagctgataagcaccttcagcaagtggcaggatacaagattaactcaaaaaaatcagtagccctgttatatacatgataaatgggctgagaaagaaatcagagaaacatcaccattaacaatagccacaaacaacataaaataccttagggtaatgctaaccaaataattgaaacaactgtataacttaaaggttttattttttcttttccgtttttttttatttgaattagaaacaagattgttttacatgtcaatcccattccctctcccttccctcctcccctgacaccccccacccaactaaaaccctacctatcacaaaccctttctgctcccagggagggtaaggccttccatagggaacttcagggtctaggacatatcctttgggatagggcctaggacaaccccagtgtgtcttggctcagggagtatccctctatgtggaatgggctcccaaagtccatacctatgctagggataagtactgatctactacaagaggccccatagatttctgaggtctcctcactgacacccatgttcatggggtctggatgagtcccatgctggtttcccagctatcagtctgagggccaagaactcccccttgttcaggtcagctgtttctgtgggtttcaccagcctggtctttactctcattcctcctactctacaactggattccagttcagttcagtgtttagctgtgggtgtctgcttctacttccactagctgctggatgaagactataggatggcatataagacagtcatcagtctcattatcaggggagggcatttaaggtagcctctcctctgttgcttagattgttagttggtgtcatctttgtagatctccagacatttccctagtgcctgatttctctttagacctataatgactccctcttttatggtatctcttaagtggctttcctctattcttcccccaagacaagcttcctgctccctcatgtcctgctcacccctcctcttctccctttctcattctcctagttccctctcccctccccccaagctcccaagttttgacagaggactgatctagaaaatttacaaagaactcaagaagctagtttccaaaaaccaaataatccagatctcctaatgttgagtctttaaagaaaggaattaaagaagataccagaaaatggaaagatctcccatgctcttggataggtaggatcaacatagtaaaaatggcaatcttgccaaaagcaatctatagattcaatgtaatcccccatcaaaatcccagcacaattcttaaccttgaaagaacaatactcacttttatatggaaaaataaaagatccatgatagccaaaacaatcctgtacaataaaggaacttctggaggcatcaccatccctgacttcaagcatttttatagagctatagccctgaaaacagcttggtattggcacaaaaatagacaggtagaccaatggaattgaattgaaaaccctgatatggacccacacacctataaacactgttttttttttttttttttttttttttttttttttttttttttttttttttacaaaaagcctaaaattatacaatggtgctggcataactggaatctggcatgtagaagactgcagatacatccatacctatcaccatgtacaaaacttaagtccaaatggatcaaagacctcaacataaatccagccatactgaaccttgtggaagagaaagtgggaagtacccttaacaaattggtacaggggacagtttcctgaacataacaccactagcacagacactgagatggacaattaatacatggaacctcttgaaactgaaaggcttctgtaaggcaaaggacaccatcaacaagacaaaacagcagcccacagaatgggaaaagatattcaccaaccccacatctgacagagggctgatttccaaaatatacaaagaactcaagatgctagcctccaaaacaccaaataatcaattaaaaagtggggttcagaactaaatagaaaattctcaatagaggaatctataatggctgaaagacacttaagaaagtgctcaacatccttagccatgagagaaatgcaaatcaaaacaactctgagacaccatcttttcctatcagaatagctagagaacatttcttaactctttgtatttcatcttttgaaatggctttgtttagctctgtcccattttataattgggttaattttgttttgttttgttttttcttgatgtttagtttcattttagttctttatacagtctagttgaaattaccctcctgtcatatatgaacctggcaaagatttttctaattctgtaagcagcttcttgatgccaatgatggtgacctttgtcatacagaccccttttagtttcatgtgctcccatttgtgaattattggtcttaatgccttttaactctaacctagctgaagaactattggtaattggtagctgctggcagtggatgttttactttccttagtgctgtggaccctgataggctctagtaggctctagtgaacagccacacacctaagagtgtgtagacagcactaacaagacttgacagcttaaaaattgaggacacaaaattgggttagtataatggagtgaggatctggcagaaaaccagggtcgtggggatgaatatgaccaaaatacaatgtctgaaattctcaaaaaattaatagtagtagttttaaaaagaaattgggccaacacaggtcctcaagaggcaaacatggaaatcgtcatttcttcattctttcaaaacttgagaaactttagcttcagtggacttcgtattgctcatttgcctcaaatgacccacttttcttattgggttactgcctgacaagctatttgagtttgtctactactctgacctctgcttaaacaactcctattttagaaaacagtccaccccacaggcaaccccagctattattagtcccttcgaattgttcaaaagatttttctcatattgaataaatcagtttcctatgaaatataagttgattttcagaacttttacctttttcttctgtttagacctcaaaaatctaaaatacattgttttagtttctatcacacaccttcaacaaccttcctccaaacttttccatctgtgagagtggttctaagtccttccctcttctggttgcttccctctggatattatgcagatgttacataatataaccaaaatagaattttcacaaccttgtttgccatgattaagttcatatacatattagactgcaatgaaaactgtatttccttatttgtacattgtagtcagaaatttctgtcccacccagtcctgcacccatttaatcccaaataattacacagaggcttatattaattataaactgtttggctgatggctcagccttcctattggctagctttctcttgatgattaacctttttctattaatctatatatctataagtggtcttggattaccagagaatacccgggcaccctatattcctggtagttacatggcatctccctgactccacctactatctttctctatgtttgaattccttgcctagttaatcctgcctgtccattggccaaaacagctttattcatcaaccaataagagaaacatatattcacagcatacagtaggacctcccccatcaatacctaatgttttaacctttgaataaatgacttttttgattccccaatttaataatgcagctatgtctcagaaattataactgtcaaggacagaatctataatgtattcactctgtccattctgcactcatgatggagtcatcatttatcctctgtatgtgatttgtaaataattaaacaagaaaacactgcttttatataactcttctaagtggagtgagttttaaaaagcttttgataattgacaaggaagcatgtgtggagtggatgtagacaaatggaaaagtatttctcctaccctgttttgttggtataattttgtagacatgtagaaaattaaatgttaaagtcatatatgggctgagattaattaggaaaacaacagcttgaaagtacaagtgacctgcacacagtcacaaagataattactgacaaaagcagatctagagaatcctgctttcttggattccatttcctctctttcaaaaaaaaaattgttctagtactttctcaggttaaaggtataattaatgtatctttaaatgcattgtttatttagaatatgaaacaaaattaaataatacaacctaaatcaaagccacatgaatcatctttacctttcctgtatccatccagtcaatgctcaaagaaacggctatactgttgtatgagaagaatgagtggagctgaaactgttggcttcaggttctgtttatatttgtgtatgccccataatgtgcatattaacttaacccagtgcatttcacatgttaacaggtcaaaattattcctaaaggtgtgtgagccttaaagctcaataagaattcctaggtgttttttaaaatgctgcatgggattcttgcagtgaattctgccaaactccagagttgttttctagcttgtaagtctgatcttttaaagatctgtgttaaaataatgtatactggagatttataggtgcctgaatggaaaaaaaaacatgaagccatcaattaaaatttactctgagatatgcagttaaagggaacgctaagcaaaagtaaacaggctttttaaagaaaaaagaatcctgctcttcctaaaataagattgatgcctactgaacaacattactctacttcctcaaggtttgcaaccccaaagactacaggagttttccatctacaagtttcactgtggtgaggaggtgatgattggcataatggcctctgtgagtttcaataaggatagcagcagcaacccttgatggacactgcatttcactagtttttgtagtagctgacaaaatttcccaaactaaagaataatcctttgttcttaaaataaaactcatgttagtaaaaatgttactttgcttatctaatggcctcaacaaaattatacattgtgttagtctcaaagcaaagcctgatttagaatgagagtcatttctaattcaaggtcaattctactattctaattacatttatgatgctgcattttcaactcttgattctgactgaattaataatatatcaagatctttctaagaagaaacctttatataatcagcagaattaaaaaaacaaatagtgaaagaaaatttctgtaagtaatatattgaataagtatccaatatctagaatatatgaagaatacctatagctcaataacaaaataatcacattaatattatcaagtgacttgaataagcacttctctaaggaaaaaaaaaaagacagataaccaataaggaaaggaaaatatcttacaccattaaccattacagaaatataaaataaaagcacaaaaagacacttttcatgttcatcatgatgatctaatggcaactcgtcatcacccacctgcatgcattgaaaatcatctagagggatggtgaggtacgttacttggtttctgtgagggatttcccagacagaatgtactaacaagggaaaaactgcctttgaatgtgggtggtgccatcatcggagggtaaagccagtatgaaatacaaggagggagagagagagagagagagagagagagagagagagagagagagagagagagagagagaagtgaccacattcccttatactttttctgtctactataaaaaagctctttcagcacatggcatcaccatcctgatttactatttcaaaactgacccagaaacagagctaaatgacattggctatgtcaagaaacagcagagggagcaaagtatacaaaaaattacttctggaaaaaaaacatacagtaacaatcagtatccaagcagtcactactttccccgtattcacaaacagattttagtcacataggaaaaggcaagagaacagttacaagactactgaaacaattcagagtaagaagacatcagtgtcaagtcttacattacctgcttatactctttctattttgttttttctattgcccataggaagcaacagtagatcttagaaatgatggatagatagatggatggaagggagagagggagggagggaggaagggaggagggaggagggagggagagggagggagggaggaggaggggagggagggagggagggagggaggatacatagaaagacagacaaacagatataaaacaattgatgtaagtttgtaatctatgtgtttcttgatcctgatgtttgaaactgattgacagaagaagaccaggaaaaagaaaggaagaaaaaagtcaaggagataagatggaggaattgtaacagatgtaacaatttgctcacaaacagcactcccctaggaacttgtagatctcaagttagtgctggtctcccaggaaataaccaacaacttcttattctgtattctggccaaaaatctgaaggaaattctactcttgccctcctctctacatcctcactccatttcttccatttcctatgaaacgattccttaaatctcatctcttgaccatgcccagaagtaatctcctagtgtattttgtccattccatagtaatgcctgccttctttcccatgataataaccttccaacacctttgtcccacttagcaggctttccagtttgtttgcttagcacacagagttttaaactatatcaatttactttgtacatgaatttacacccatctgtaagtgatagtgagatcattggattgtttggaggattaaatgagttgctacctacacagtatgttcacataactggtagctacagagcaagcattctggaaatgtgaattattatctcaactgttgttatattatcgttttttcataaaatacaaatacttccctgctatttctctggttgctagtttttgagaaagtatctcactttgtagttcaggctattctggaactcacgatatagctcgtgctggccttagatgccctatcctcctgctttagcatctcccaagttctagaatgacaagtgtgcattcccactctcatctttaaatgccaaaggctgaagtagacttaggaagagggttggttgagtttcacagcaggtggtatcaccataaggaaactctctatgaggtcaaggccaagaaagcatgggccattgatgcccccatgatagtctgggaagcattaaaggataaccaaatgtcttctgcactgttttatttttctaagctgacattgccttggtcctcatgttttattgtctctcttccatctcctctctaaatgaccaactctttgctgagttttcaggcttatagcagcaagctggtattcccatattccaaacatgaatgctcaactaaaacacttaacagaaatagtatctaaaatgttgtgtgactagaaatggctggtcgtcttggggcagctgagaatcaaacagtctgcaaaacaagacacacaacagtgcttgtgtcttatctgttgcataccactctaattgatattctggccatgtcttcacaacttccctagaaaaattccactggctttcctgtcttactcatttcatatagtccctgtaatctgtcagagctctgaccttgcatattggtcctgttgcaatggtgctttttaaactttccattctctgctatgtatcctttacctcaacttgagcaagctgcatcgactggtgagtctctttatctcatctcacttcctttgcactgccaattatttggtttcttttacattctccaattgcagctgccaaccctggaggtggtttgctgcactgcattattgtacaagagctgactagtacagaaatcttcttaatatatccattcttcaggacttaaagtatatggaaacatcctccagtttagggaatgaaaagtaattctcacatgacaagatttacatatgtgttcctgcctcttcccattcctggggtccattcctttatcccttagagtccttcatgtttcctagtttctttggtgaagaggattataggctgataatcctttgctctatgtctaaaattcatatatgagtgagtacataccatgtttgtctttttgtgactgggttaccctactcaggatagtttcttctagttttatccatttgcctgcaaatttcaagattccattgcttttttctgctgagtagtactccattgtataaatgtaccacattttctctatccattcttcagtgccagattgagagcaggagaagaggaatggaggagaggaaatggaggagcaaaaatattgagttgtgggatgaatagaggagagagagcagaatgagagataccatattagagggagtcattataggtctgaggagagctctggcactagggagatttccagagacttacaagacctacaaggatgacacaaactgacaatccaggcaatggtggagagaataagctaaatgctcttcctctaaaatgagattgatgactactttttatgtcattccactagcaagtggcaggaactcgaggcaggtatacctcaaatgagaacacatgtgccttttcctctctcacactgtatcttagcatccattctggcctcggcaaactatggggcctcaggtggtagcttagtatttatccctggcataccagtagactttgggagcccattccacatggaaggatgctatctcagcctggtcacatgggcaagggcctgggccctgccctggatgatatgtagattttggagatcccctaggtagggcctcaccctccctggggagcagaagggggctgtagtgggggggattggggaggctgggagacagggggaggagaggagggagagggagatgggattgacatgtgaagcaagcttgtttctaatttaaataaaaaacacaaaaaaataaagttgtagtcatcttctaataataatttagttccaagattgttgttatattctgatcacttctgtttgtgattgatagtttgtagatggtagttcagacgcttcacataaaacaggaaatatttaaagcattttaactagacacattatataacttggcacttcatttaaatttcaagacactatgacagttgccctggtaaaccagaagagagcatttacccatggcagcacagagacccagagtttatttctaagattctcctgtaacatatccactgatggaaatttgtgtttgggcacacacatctaaaattgaacaaagaccaaatgaccatcattttactattacaaagaaaaacatgtttgaaaaatatgacataaaatgcctccaacaacaatttagtgaaactgtggttgatagataccaatttggagtaatttactctaattattttcgtctctttggcatccaaacaagaccttctgttctgaatgttttgttatttttttttctattttcattcagatttttatatatattgtgtctttcttaatacagaaaatatctaagaagaaacagaaataatcatgcttcttatttgaatagcaagctgctggatatcctgacaggccacaaagcaagttatgtaccaagataactagctctaagatccctccaaacagccctccaaagaaagccttagtgtggatagtcaacattgtgacgaccctgttccacctatctttctatttttattaattttatgttagcataaaaagtcatcatggcatcttcacatatatgtgtcattatattttgtttccattctttcccacccaccactgccttttctggtacctactaccctcacttcactgtttttttctttgccccagttaatctttcttccttattatgtatattccatcaccccctgcatttccacccttccataaaatcttttccctccctatcatgattccctttatagtttcctgacttacacattcttatatgaatttaaagatatcactattgttcttctactaggttttaatattaatccaacccctatgaactttttgtaatacccatagattagcaaatctctcaaaccttatcagaggaatttccttttataaaatatagtgattatcacagggacatatgactggccaaatagcatagagcagtgattttggagtgctcagccctaaccgcaacatcagcccatcaccatctcttcccaagattcaggattcctttgtaaagaggagatagaaggactgtaagagccaaagatagtacatgactacagtgaaacagtattacctggacacaataggaaagttgcacatacgaatccacagctcttgtaagtacatgtgcaaggcctgttcaagctcaaggtagataaaaccacagtcttgggggtgggggagagtggacatgaagtcccacccctagacaagaatctattggtaattgaggaaagagattaagtgaatttaaggatgtggccccaggtatgtctaacaagctcttgtcactagtagaagaccgtacacacacttaacattatatagacagtactaatgaaacattatgggttaaaaaataagagcagaaagctgactgagtatggaatgaggaatggatctgagagtaaattggatataaggatgaagctgttcaaagtacaaactaaaacattcttgaagaattaataaatatttttaaacaaaataaataaaatctagggtttgcatgtgagagaaaaatgggagattttctttgtctttctgggattaatcctattttgatatgccaaaacacagacggaaattcaagatacctatatagctaataagttactgaatttataaatgttaaggaatcagaatttaaagtgtccaaaattgatattacggacaagaataagaatgaagtctaacaatgaaattatgaattagactagatcttggaagcatcttaaaagtatggagtgcaaaggaagatccagcgcaaaggaacaaaacaaaaaacatagttattgagaagttgctaaccaataatacagtcctcagaatttaatatttaattcaagaatccagttctccatcaaagttcaatataaatgagtatggtgataggtcattgtgatgggggattttcttctgtatatatgtttctcttactggttgatgaataaaattctgactggccagtagtcaggcaagcagtataggctgggctagcagaccaggagaattctggggagaggaaggcagagaggagctgccagagagacaccatgcagccgctgaaagagtaatatgctggagcattctccggtaacccaaatatcacatggaaaggcacactttaatagaaatggttaataattaagagagagctagctaataagaagcttaagccattagccaaacagtatataattaatataagcctctgtgtatttatttgggactaaatgactgtgggaccaggtgggacagaaagtgtctacagtcattgccttggactctatgcccaacatctctcttagaaagagagaggtagcactccaacactaaagtaacataatcatttgtactcatgttccatgatgagtcacagaaatatggccctaattacttggaaaaaattgatgggaaatacataaacagtgactaactataccgcagtgacaaagttaccttgtggggcaaagacacaaaatttgttaaacaatttggtatattccttcagaaaaaagtattatatgtgtcactatgtgtcatggaaaggactgtgaaatactttatgttgcttcaatcaacatataagccactggtttacatgaaaaatgaaacaaattaatggcacgtaagcatttataggtcaaattcaatttcagatgaacattttgaatatggaccattataaactggttatttggcttctgttcctttttagcatatttcaatttttttctcaaaatgtttacaatgttcacatccagtgcagacagtaactttggtcaagattggtgtctatcacatttgttacttgtgttgagacttagtaaacacttgacttggctaagcagatattgatgtattagcacctttcaaatagttaggttcccccagtccttcctacaacaaaatttcaaaattgaatcaaagcaaatggcattttcacaggcacaagagtgaaagaaaacagattgcagactcagacaacagcatgaatcttaatatcacatgtcattcttggcatgtcctcccagatactgtgtttgtgcttagccacaaatacctttgtgtcattcaaacacagcttagaaagtagattttgtgcctttcattttattttaattttatatgttttttgagattttcatatgtaagtgcagtatatttgtatcatttcaaactctctccacaaggaactcctttgtactgacatcttcataagcatttattgtctattatttgcttaactttagtcatttttgtcagaataagatgggtttcaaagtagttttaatctacacttctgttattggtagagatgttgaacttgtttttggatatttcctagtcattcttattccttcttttgagagatctttgctcaaatctattgtcaatgttttattggattgttttcttgatgctttggggattttttagttctttttttatatagattttatttaaattaaaaacaatctaattttacatatcaatcccagttccctctccctcccatccttccatgcccccacctaatagtctgggtattaatcttctatgggatatgtagctaaaaagactacctcccactctataggcttctgcttaactgaattgattatttcttttgctgcacagaaattttgtagttttaaaacataccatttttgttgaactaattcctaagcaaactgagacctctttgggaagccatttcccattcctatatcttgaaggggtacctttggtcacaccttaaaatcagtccctttcctacacttaaggctcaggaaacacagctgaagagcaggaaggaatgttataagagccaaaggaccagggagtctcttgtaagactgtgtctcctggtaatgtcaaaagctatgtccataaagtcttaccagcatgactgcctaaacattagctgaacataacagaaataatagacattataatatgagcagaagaaagccttcaaggtctcaactctacacaaaaactatagaaaactaaggaatttggggaatggcagaactagtcttccatagaacacaccagctggctattctatacccaacagtaggtctgagaacacacactagtaacattatagagactgagcagattgtatttatgtactaaagaatatatgtgtatatacatacacgtatgtaacaatacataatgaaaaagaaggccatgaatttgtaagagatcatggtttggttgggtgtattggaaagtttgatgaggaaaaggaaggagattataatttccaaaattaaaaaataatatttttaaataagcagtctcaagaggaaaacttaaaatgctacatgtccacattaaaaaataagaaaaagcactaataaacagattaatgatatagctcaagagtttggaaaatcataagacccaaatccagtagaccaaaaccaatataaatcaggccacaaattaatgaaaattcaaataagtaaaacaatagaaagaatatggaagtttgttctttaaaaattaaacaagattgacagactattagcaaattaactaaaagaaagagaaaagccaaattttaaaatttgaaattaagggaagattaataaatccaggtgttggtagcacacgcctttaatcccagcactcgggaggcagatgcaggtagatctctgtgaggccatcctggtctatagactgagtgccaagataggctccaaagctacacagggaaaccctgtctcagaaaaaaaaaaaaaaaagaaaagagagaagactaatacaacaggctccaaagaacctcagaaaattatgtgaatagttttgaaacctagtctgtattcaactgggaaagttaaaagaaatgggagaatttatacaaacatttaagtcaccatagttaaatcaaaattagatcaattgaaaaaattaataaataaagagactgaaataataagttttaccaactcaattaagcccaggtccaggtggtttcacagcaggctctaccagactttcttagaacttcttcaaattactccaaaagctaaaaatagaaggaatacttccaaaccccaactctataaccagtattgctttagtaccaaagccaggtaaagtgcccacagagatagagagaagatagatagatagatagatagatagatagatagatagatagagaaagcaatagacagaacactgtagcacaatactcccgatacattaattaacataaatgcaaaaaactcaaaataattgcaaattgaatacaagtatgcatcaaaagcctaacatgcaaaacctaaatgagctttatccaagaaatggttagacacactacaaaatattttgagaccattgtgaatggtattgtttccctgtgttttctcttggcaggctttttatttgtatatagtaaagaatgatacttttatgtgctgatcatgtatgctgatacttagctgcatccttatatcagctatagttttctagtagattcttaaggtcctttttttagttgaaaacaatcattctgagtgaggtaacccaaagtcagacatgctttccctcatttgtggattctagctttgaatctgtttcatttgaaatactgatagaagtcatgaaattagttacagccatagggaggcttcaagttgggaaaagtagaaagcagtgataaaaggcataaagcaaaacagtggaacacgaagagttaaattgggttgtgggttgagagagaagggaatgcagagagaaacatctaccaccaaagaccttccagaacactcatatggaatcctactgctgtagaagcttctaaatatacgtttaaacacatatatgaaaaagaggtaagatggactcgctctataatgcgtgataatgtccctaccagataacacaggctaatatatcaaaagtccagtgccagttaaggatcacctcatttggagttgttggccagttgatatcccatataccctcaaatactatgcactattgcaaattctattggttactttcctgaacatgatgtgaagacctagacctgaggacaccacatagttgagtcatagaagatggaggtgtggagctggtacttacctggaagattcatccttattgctaggagaatttgtagcatattcctttatcaaagctatcaataattgtcaatcttacctagctggaaacaacaatctgcaagctaccataggactggcctgaccaggccagacacgcccattggtgcaacaatgacacaaacagcatggtagtaaacaaacattttctggttgggtttttacgtcctactccacaagatgaaacacatgtatggtattcttatcaggacacctgtggcaaggaaggttataggccatgaaggagaacctactactattattttgctaaattgatatatataatatatatatatatatatatatatatatatatatcatatattatatacatggacttgtaataacttagaattatacccataaatgaatgcacttctcaatcctcatcagcttttctctgcaagagatggcaattaaaacagagctcacaactagtcaaggtacagaaaataaaagtgtggaatgcttggtcctatactggatatcagtatcacacctgctcctcctaggtcagggatcactgaaagaaaggtgagcaagtgccagaagtagtagatgactaggaggaaattgagtcttctggaaacaggagtacaactgcacataagaactcacagtggttgttcacagtattaatagaaccggagggctagacatcccactcctagataaggagctaatggcaattgataactgccaggagattgataatcagttgtctttaagagtatatctcctgctaagtcaatcatgctccagtggaaagccacatacgtaagaatttccggagaggacaaattggactgtgtaggtattttttcaaggacacaaatatctgagtaggcaaggtgagatctgagaggagataagagagtggtaaatatcatcaaaacatcttgtatgaaagtctcaaagaactcataaaatatttttaaaagagaaggaaattaaagtggtagaaacaagaagtcaaattatccctatttttacaagatatgatattatacatgagagaactcaaaggtttcaaaaaacttgttaaaataattagcaatttcaacaaagtgacatgatataaaattaacttttaaaaaatccatatctgtcctgtatatcaatgacaagtatattgagaataagattatagaatcacttccattcacaataacctaaaaaggtaaataaagaaaaactaaaaggcacccagtaataagacctctgtaatgaaaacttcatatcattgaagaaggaaggaaagaaattggggaatttactaaaagacagaaacttcccatgctcaaggagtagtagaattaatattgaaaaatgaccattctatgaaaatcatattacaaactcagtgcaatcccaatcaaactctccatgatagtttttaaaagcatcctaaatttcccgtggaagtctgaaagactctagatagccactgccctaccaaacaaaaagaataatgctaaaaggattgtgatacctgatttcaagttatattacaagatagatacaaaaacagcatggtactaacacaaaaattgggaggaggagagaagtgaatacataagaatgtgagaggagggtaaaagggagtagtccagctcaaattatctgatggaggaagtggaaagggaaattcttaggaaggggcagggagtcaaacatagaaggaagtgagagaggttaaagagaacgcagaacacacgtgttctgatagggaatatggaaagcgatggctttagggaggggataaagaaatatattatagataaatagaagacccaatattaaaagcttgcaattatagtcacctaagattgacaaagacaccaaaagcaaaaacggtaggaaagacagaatctttaacaaacgatggtgataaaaccagatgtctgcatgtaaaaatgaaatcagaccaatatgtccctccctgcagaaaaacaaccccaaataagttggaaacctctctgttaaagctgaaatgctaaagctgctaggtgattttcctttcaggcaaacattataaagacagaaaaaaccaagactcgcttcatactgatctataggttcttatttacacaaagaacagtgctttttaataaccatcagtcatttacattacctttttttgtcattttcttggtgttctgtttgttatttttatacttgtcatagttggtgctataaagtaacaaataatttcaatctttattatgatagattacacagtctaagataaaatgtataattgacatatgcaaaggaagagtgggcacatacttctgggaagaaaggtcaaatgctgaaaattattttattccttgttcagtatagcttgaaattctttatggttaagagaagggctattactttggaagtaggaaaggcagttaaaatgctcctatgaaagctaatacattaaaagattcatagcctagatgaccctttcccttctccatcagtgtgggaagggacacaatgaaagaattatagagctaagctccagatcagagacatgtacccaacctgtttcatcattttgctcggggccaaatctgagcataggtacaacaaaattaaaacagctaggacacaaatattaatgcacacatatgtagagataagcaaatggtgcctaagaacaaatggataatttgggtgagaagcacatagttcaaaatggcaatgttgcaacttcagtttgaatttaagtccacaaaccatgtaagctggccaataaataaggcagtttttggagtgagttatagggaaaatgaagagtattataaaagaatacctcgcaacttccttaaatataaaaaagaataattcaagtaaaattaaagttcattcactacctaacaaataccatgtactcatgttttaggctcctcaaagaacatacagacagggacagaagacactcttagatttcttctttcctgtcatatccttggaaggcattgctaatcaaatgagaaaatcttccccactggtgttagatgtaacctctggttgcttcagtatgtattccagataatcactgacaacctactcagttgatactgaaatggaggcatgtttcctttattcctcaggataaaggaaaccaaagtaataaagtcacagttttatcccagaacaagtacatatttgtatattaggagaaggaggagtttattaaggctctgggaacatctgactgatggctctaagttgaaagagaaaaatcaaatgtactttaaaaacataaaaagagtgaagggcagcaaaatgctatcaaactagatgcaatagttgtaatagtgaactctcaataactgcagtcatctgccctaaattggcacaagataggcccagtagcaatcactcataggaagggaaggggctcaaagagcccaacccttcatttttgggctgttggctattgatagaatctgagtgaaagaatacccttttcttcagttatgtacaggaggctccagagcagagatacaaacccacagtcacagagaaacccctgcttaaacccagcgagcttcaaagacagacagacagacagacagatttgtaatgataaggtaactaaggacagtagggagatagaagaacatagcatgtatcatttaaatgtgtgaaattgtcaagaaacaaaactaataattttataaagaacaaatatttatggttgataatattcatctgtatgagcataagtttagaggtgtttgtatatattaatattttggcaaaatgtgtcctagtgtggatttctttggcttcatcctagttggggttcatagagcttactggctatatggactgtgtataccagatgctggcagccattatttctatacatactgttaatgtcccttgctctatactatccttctaggacattgtaatgtaagttgaatggcttaattacatctttcattatccgaagattttgttcttttttccctgctgtattcttctgacagaattatattattatcaagatcactaattctttcttctgccttctctaatatgctggtgctagcctccagtgagctgttcatttcaattattgtatttctaaactccagaatttcttcattcttattcctaatttgtatctctctaatagtctcattttgttcatgaatcatgttcctggtcttattttgtctatggttttcttaagcttgtgaacataatacagagaggtatttttcgaagtcttaactagtaaatcttatatctggacttcttaagggatagtttccttcaattccctttcttcttttgaacaggccaccctttcttctttcttcagatgctttgtgacttctcttctcgggcttttaaatgctgcaatgtagtcactctagacatcagatttttcattttcctcacccccctccttcttttgttcttctttcttctttgccagaagtctgcatttctagctagctttttgtcaatgttgaaggccatgctgtgtattgcagtgacctccccagctgcctttacaaacctttcctctagcctgtgtgctccctgaagtttctgctcatcttggattcagcttgtgttttgactgagtagcttgaaaagtcaagagaaatggaagttaaatagcaaactttctttcaatttttacatattggctctgtgccacagtattccttcaatacttattcacccttctacttagcttgagatttagcctagggtgaaagctttgggtgttctctgttcttttgtcaaagtatgtcttgccctaagcataggcataccaaccctaaatcctatgtatttagactacatcttctaaagtaatccctcttagtgtttgcttctagatgtcagatggtctatcttacttttcagtcataatcttttgtctgaaatgtttacaattgttggtccactttacagaacttctgggtagggctaacaaacttacagcccaagtggtgagttaggtggaaatagaaactagtaccctcaccttcggacagtctttcagacagccaccccaaaagaataaacatctacaacaatctgctaaataataggaaaaagcccctcagtaactactgctcccaatttcaagtatgtaaacacagcagaaaaggggtgatacagtggtaagcaaaaccaatgtgatagtttcctaatgacaagttttccctttgtttgattcagcattgtcttggtatcttagtgtctcttcctgttgctgtgatgaaatactctgacaaaggaaacttagggaataaaggttttattccaccttacagttccatagggatatgttctatcatggcaagaaagtcgtggtgacaggaacaaaagacttgttggtcacactgcgtccactcagaaagcagagaatgaacagggaatgtgtccagataatgactcctcaagacaatccctcagtgactcacttccttcaatgaggttactgcttctaaaagtcacacaaactttgccaagtgttccatcagctgggaaccaagtgttacaagacatgaggctactagcaatacctcaattaaaaaagcacagtgttctgcccctgacactcattggcttatgactgcctcttaaagcaaaatgcattcatagtaatggtagcagcccccataatcttattcttttacactcccaataaaatttaaaaagtccaaagtctcttctaagactgaaggcaatattctaactataaaccttataaaataaaaataaataaataaacaactacacatttccaacataaaatgtcatggcatatacactccaattccaaaatagaagaattttagcataggaaagaattttaggagcaaagtaatactggacttagaatacaattggctggcctacaaatttgttaggcagtctacagtttgagttccaggacagccagaactgttacacagaaaaacattgtgtcaaaaaacaaaacaatggtggagccccggttgggggccctaccctgcctggggagtggtgggtggatggggtgggggggtaggttggaggtgggggagaaggaatgggggtaaggggaggaagagggagagggagaggggaagtacaagtgaaacaagcctgttccctaactcgaattaacaataataaaaagagagagagaaaaaaaaaacaaataaaaattatatctggaacttggggagggacattactgtgatattttgaatagatagatagatagatagatagatagatagatagatagatagatagatagatagacagacaaaacaaacaaaatggcttcaggcacatgatctgagaacactactgaagctgaattgataaaatggactgtttgatagaagaaatacaaagacaggcaaatactcagtttgattttgacaaaacagctataattgtgaaggagatcaacactactgaagagaaacctcctgaattgtccaagtatgaaagatattccatgggcaaaattctatgtattagggtctccatcttgggaagaacaaaatgcatttgaaggaaggaagcctaaacggaaggggttccctccttttcgggggtaattacctaaggcagtgtttccctggggttgccagaaagaagctgattatctatagtctgaggtgccaagttatatctcaagattacagcagagcttggcaccattattcatgtggtactgattttgaaggtatggaaagtgcaagattgatggagttatagtcctactccacagattcagagagcaataaggacaatacgtgtggcaggcttggagtctcctcaagcaggcctgtagagttcattgtatgaacctctggtgatatttaagttgcaccaaactagggatgacaggacaatggaacatctgccaaggaaagtcataagtatgtggtggactcagcctaaaagagaggcaatgtatgctgtgggctgcagacctggggggatagactatctaagacatttgtgtaccagccaattaatggaagagtatactccatgccattttatgttggaaatgtgcaagtgagtatgtgtgccctggaaaggcttggggaacttcggactccctgaagctggagctactggaaattatgagacatctaacattggtgaactgaaatctgcaagagcaacgcatgcttctttgccattaggctaacacttcagtcccgaaaaatcaatattaactatcacagagtgtaatcttcacactctcactcatgctctttcaatcatctcaactttatatatgatatgtaatacagtgtaaatgttaaccaaaaaaggctttatggtttattatagaaaaatgacaaaggaaaaagtctgaacagcttcgtaaagatgggatcaccactggtaaccacacagaacataaacaagacatgaggcaccggtgctcaaatgctgagcactgaagagaaaccaaagatctataaagtgtcaggagactccaataaggtgtgctaagttcacttcattcatttgcgtcaaccttgtgcttgtcctttggaaaatcgaagctttgcattttcaggactctctagaattttatcaaacattttttgtttactcttgtttgaatctaaggacgtaagtgtcaggaatatgaaagtctgtacagccttccaagtactcataactttcatagaggcagaaatgtttccttaatagtgtaccacccatatcatcatattcacattgtctataacatcattcaaacgcaacagatatgagtaacattgggtttatcaattcatacattctgatactgaataatcaatgggtgagctactacctaactctaacctggtgctctgtgaattatgcacaaattcagtcctgagtccattgacatttttttcttcttcaaccatggcaagactgccccatttgagagtcttggtacttcctgtttgggggtataaaatgtttttctcaaatgccttcaaatgaatgactacacctatcaagtgagtttctgaaatgttgagagtcttcatggtacaggaacaataccactcaaaagtctcagcctgacattcaatttctgtgaccacagagtttcagtggctactcactaaccataaaaagataaaatcattacaaagtggatagcctttgttctcatcagtttatagcaagaagagactaaaaagagttattattattattattgttattatcattattattgtttatcttttgttattattattattattattactattgaattccctcagaaagaaaggcctggtgctttaaatggtttttataaaacactgtatttctttccatgaatatatgaccaactagtaggtgtttgtatccatcctgttggtttgacttgcctatgtgtctcttaaaccatatgcagtttgagagtcatcaacctattccttatacaacttagtggatctctgctgatcagtttaaatcacatacatcaaaaaaatctctcagactattaaagaggactatccccaaacatcatgttataggagaaaccagaatgtggtgaggttatgagcctgacccacttcggtctgagttttttttcaatgcagtaggtcgtatcacagctaagcactaatatattacttgtataatttgctgaatgttctttttccagttcattgaagattatctgatattcttttttaagggttattaaggtactaaaacatagacatttattaccactgacttagtaagcagctgagctccagatgaacattaagatccagcataagctcttgattttgtacttttctagaatagagtatagagtcctgcaggaccaaatctttgttgccctgttctagctgcccctctgttccctactatctacacagccaatttacacccatgtttcaccagcacgcagtgctttttctgactctgtacatgtgcttagagtggagttttcatctatgtaattcctattgtcttgggccagttcttatgctattttcagaaagctttccctggtctcctttgtatgggaaacaatttgaaaccttcctcccatgtcattctcgtttttaacatatttggtatgactacaataatgcctgacccattgaagaatagctacataaattaactcatttattatcttgttaattacttaatgactgtgacctgctgcattttgttggatttattacttgattttgtttctatctaacatgatccttaccagtagtatttatcaccggttcagcacgcatcattgaagtcatcaacaagaagatgtctcataagttcctgtcaaccgagtctaaattttgaaggtaatccatgaagtatgggcccttaatctataaaatcttcacagtagggtttaagaaagaatggagttgaattaaggcaaatctaaagccatttgcaaagcaaaacatttggttcagaaaaggagtttaacggtttaaatgtgttttgggttgaaatgtttgctctagtaacaggcttttctaaaatgtgttcttgctgttttaaaggcattaggacactgaatgataaaaacatctctagccctcagactagaaaagtgatagtagaaacgcttataggcaaggattctgcttcacacagtctcaaaatatttccctgggtgaaaatgttcttagaaacagtttaaatagaaagaattatgttttccagctttgctacaagcatcatttcattaacacagaggccagcacattgtcaaaaggtaaaagcagaattgattccacctaacaacaaaacaaaaattaaaattaactcaatataaagatcaaaatagcaaatgaaaattagctttccatatctattcctaaagttaactcatgaatcataaaatattattccctcaagttgtatttgctaaagaaatagggaatgacacaggtaacatgttaagacaggttaaagcaactatagttgtgtatagaagtctatatgaattcaaggctttgaaaatgtaaaaaagacacacaataccacatactgattcacaaaccactatacatggttggcctgtagaaagaaaaatattcagaccttcagcatatgcaatactcacattttatacagaaaatatgtattacttctattctttttataatttacaaaattggaagttgttcttaaatattttaaatacaaaattttaatgggttaaatgtgaaatgagagattatatgatgtaattttaaaaagttagtttttgtcctaaaactaaataatttaattaatactacacattaccaaaagaaatttaaagagcaattaattacatgctttgtaaatccaaccaaatactgtttatttttatgttttagaaatatatattttcctacaaattaaataaaaataattagttattaattgtgttgttttaaacacagagcatggtgacacatttctaatcccagtgctgagagaagaagatgggaagacactgggagctggcaagccccatgtcctagtaggggacatgtcccacctcaaaacccacacaaacaaggtaggtgattctagagaaacaaagcctgaggttaatgtctggtcacacaggtttgtgtgcaaatgcatatgcacttgcacatacaagaaaaagcacacatatcacatatacatgtacacacatatttgaataacttagggatcatccttattaggtgttgctaagtggcattgaaaaaaaagaaatcaacaaatttgaacagattctgatagtgaaatagtaaatggaaaaggtaatgttagttaattgtgttgtgttacatattgggcataacaaaacttacgggtttaacataacaactggctttgcttatttatttatttttttacttacttattttaatgtaatgcaatttatttttatttattttgttttttcaagacagggttgtagagaaacactgtaaccactcctactaagggctggctacaggtgaggtcagagtgacacagcatgggctcttaagcagatgagagctcttgctgcccctgggcatgctctggcttgtgtttggctggtatttacctgaataaaggtatcttgaatctacaagcattctccttcacagggtttttctgtgtagctctatctaccctggaactcactttgtagaccagtcttacctcaaacccacagagaaccacctgactttgcctcctgaatgctggatttaaaggtgtgagccacaacacccagctaaaattcccaaagaatcacaaaagaagaaagaaaagaaaaggaaaaaaagagaaaaaaacaaaccaaaatagcaaaacaataacagccaccatctcagatttttggaggtgcagaatctaagcaaagcctaccttaacccctctgagtgtcacaaggcggagtcacagtgttacccaagtactcgggccagcaggacaggctgaacttctcagtctactcagtagttttgataagatccagtcctttgagagtaccacttcatcacatcagtatgtccagccacatctgtctagagattataaaagtgaatgaatacagggaaggggaaccctcaaaaaattttcaagatttctacattttcttgtaggtaattatgcacattttaaaatatgaggaagaataaaattagagaaaggtattaaggagtttgatataggaaatctaagtaacctgctagtgagcagtaaaatgaaaaagaccaataccaaacagcacagacacacagacacacaaacacacatagacacacacacacactcacatgcacatgcatatacatacattcacacacattctctctctctctctctctctctctctctctctctctctctctctctctcactctgtgtgtgtgtgtgtgtgtgtcacacacacacacacacacacacacacacacacacacacacacacatgcacacacacacgcacatgcacatgtgcatgggtatatctgtatctatcacatactgtcaggttgtaaatttttacccagaagtttacaaaaaaaatgaggctatcttgtcagacagcagaacactcacaagtcaataaaatttactcagccatttactagagaagcatcaagactctcagtgttagaaacgtgaatttcaaggtagttaaaccaatcaggattgaaaattgaatgctgaataggatagattgagccatagaactggacaaatttatctaaacaatttttattattccttagttaagaaagcctccattatagatctatttagggtctggtgatttaggatcactctgtatcagtgggtatttattagcttcatgtgtctggactactggttttaaaacatagcattcagtttcattatttcaagtaaaataaaaattttctttttatcaggaaaaaaagaacatattgcagagaaatgtttcagcaaaacaatacaaaatacattctttttgttttgttgtatatatttctgtttgttgctataaacacagaggtatggaaagataggtgggagtcaggtaaagttcctttggggaccagggagtaaaagtagtcgtttgaaagaaaatggcacccaaagggagtggtactattaggaggtatggtgttgttagagtagatgtggccttgttggaggatgtgtgtcactgtgagggtggacttcaatgtgtcttatgctcaagctacttccagtgagacagttcacttcctgttgcccttgcatcaacttgtagagttctccaacaccatgtctgcctgtattgccactatactctgagcctccacatcctaccatgatgttaatagactaaacctctgaatggcaagccaccacctcagttttaatgttttcctttataagtattgcaatgatcatgatgtctcttcacagcaataaaaacccaaactaagatactgggtattaaagatttttgcactgttctttataaaagagctttaactccttttaaaagctttttctagcaatgctgccctgtaggaattatttcagagctggaacaggaagtagagacagtggttgaatatgaaggtagtggggcagaatggtagtttgttaaagaaagaaaaaagacagaggacatggagtgattccctgttgaacagggaacaatgtgttgggaggataaataatgcaagcttctcacccagcataaggactaattgtgactgaagtcatacataaatgtttgtatttatgtatgaagtaatacattgacatttatgtatgacttcagtcacaattagacacaatgagacaccagtgacagaaatatatcccatgtatttttctcatctatgtccagttgcacaattgtccaaccagagtacctgagttatcagaatggaggttgaatttttgctaacagaatgaagaagagtggagcaagaaagatgagaatacacaggtgaagaagcaaaatacacaaatccaataacaaagagcaaaggacatgataggaaaagaaaaattaagaaggtggtgaataaaagggagtgaagtagtagtgtttgaagaatttgggaaatttggaacatcagagacagtggagaaataatatcagagttatggtatctttaaaaggttggtctttttcttcatttgttcttctgtcatacaatacaccctgatgacagcctcccttctctccactactctcagttccccagacacctccactctccccgagatctactgctccttcattttccttcagaaaagagtatgcctctcagggatatcaactgaacacagcataacaaaatgcaataaggttaggtataaaccctcatattaaggttgaataggggcaacctggtaggtggaaagggtccaaagagcagccaaaatggtcagagacacccccactctcactgttaggagtccccccaaaaaacaaactaaacaaccacaacatgcatgcagaatacatagtacagaaactgcaggctccatgattgacacttcagtctctgtgaggccctatgagcccttcttagttgattctgtgggctgtattttcatggtgtctttgactcctctggtttctacagtcctgcctcttctttaatggagttcctgagcttcacctaatttcagctgtgagtctctgcctctgttcctattggctgctagaagaagcctttctgacgatgattgggcttggtgtcaatctatgcgtttagcagaatatcattagaaaatatttcattgactctttttggccaataatgtttggctctacctaggtctctaggccatccagcttctggttcctggccatctaggcaatgtcagacataggtttcctcagatgggtgggcctcaagttagaccagtccttggctggctattcccacaagcactgagtcaacattgctccaatgcatcttacaggctggacagattgtaagtcaaaagctttgtggctgggttggtgtcccagtcccaccactggatgctttgcctggttacagaagatgatctgttcaggatccttatactctcttactaggtatcctcaccagggtcaccctcagttattccaggaagtttccactgcactaggattccacatctccaccttcagatgccccccaattccagtcatattctccccctccatccctttctcattcacttgaccctccctgtttccatccctcctgccctaacctacccacataatctattctttttctccttcccagagagatccatgagtctcccagatccctcattgatacttagcttctctgggtctatggagtgtagcatggtttttctatacttactggtaataaccacttaaaagtgattgcatatcatgtttgtctttctgactctgggttgtttagttcatgatgattttttttctattctatttcccacaaatttcacaatgtcattgtttttagcacctgaataatactatataaatgcaacacattttctttttccattattcaggcaagggacatcttggttgttttaagtttttgactattacaaataagactgctatgaacgtagttgtgcaagagtccttgtggtaggatggaatgtctgttgtgtatatgcccaagagtggtggtgtagctaagtcttgaggtacattgattcccagctttctgaggaacctccatattgaataccatagcggttatacaaatttgcactcccaccagctaaaaagagtgttcctcttgtccacatcctctccaacatgagctgccacttatatttttaatcttagccattctgacaggtgtaagatggaatctcaaagtcattttgatttgcatttcccttatggctaaagatattgatcatctaagtgtttctcagacatctgagattcctatattgacaattctatgtctagatccataccccagtgttattgagttttttttcttaaatatctagtttcttagtttctttatatattttgaatattagtcctccataagatgtggagttggcaaaaatcttttcccactctgtagattgctgccttgtccaatcaattgtgtcctttgccttacagaagcttttcagtttcattaggacccattaaattaattgttgatcttagtccctgcactacatatgatttggactaaagaaatagctcagccattaaaagcaagactcacaactactaacttaaaagccaagtggctagaaagtcacttgattggcttttttttcatgaagaatcaaattgaagatctaggtggtagctattctgacatttatgaatcataacacaatacctagcagattttttttctcttctgatctccagttcaatttgttgagttggagtctgtagtaggcatagcagttgagaatatcaatgaccaaatccagaggagaagtattgaaggtattgagatgtcagatccttatgtcaaaattataaacatttagaattgagatgcaagtaagttagggaaacagaaaatcatgtgatagcatccatgatttgagaaatgtggtttgaagcaattgaaaagtagagcaaacctgaaagaaattagtgttcaacaaggaaaacaaggcattgctgaagtcacgatacccttttaaatagctaacaatagtaataaaaattcagctcagatgtgccaaggagtatggttggagcaaaagaacaatctctctcacccccttttctacagcagttcttgtggcagtttggtttctattgcttctgtagtatatataataataaaaacccagaaacagttattggggctcaccctgaagaccagagaagcaaagcagccaagccaccagagagctcttacctctatcaaggctgggataatcctgtcctcaacatggctggagactaattgcctgctctgagacactgctcctgtcttatatatctctctagtgctgggatcaaaggtgtgcaccactgctgccatgctctatggctaactagtatgggtgctgggatttaagaagtgggccaccactacctggcctctatggctatggctagctttgcactaggatcttcaggaaagacttattagatcataaacaaaatatcaccacatgctcggatacagcactggccaaaatcagttggagaagagaatgatttatttccttttacattttacaatccaccatgaaagaagtcagaacaagaactcaaggtaggaacctggaggcagaaattgaagcagaagtcatggagtgctacttactggcttgctcctcagggcttccatatatttcgttcttattcagcccagaaggagcaccacccataatagggtggtcccttccacaacaattatttaacaaaaaaaaaagtcatacatgcttgcctacaggccaacacgaagggaatattttcttaactgagattccttttctcagatgatttttgtttgtgtcaagttgacaacatcatccagcacaatcactgtgcaagtgtattttgggggaatgtcagggccattgcacacatgaactcatagcagctgtgactgtacacacaatatctgtacaagatcaagccaaccaaaatctcagtatgaatgggaagatggcctcacgcatccccatccctagctgaagagcttttgagaattaatggttgctgtgtgagagagatgtcagtctcttcagggatatggccactgataggctgcccatgctcctgtggagggtcctaagcccatatacatcctagtaacgctgtgtgagctcactgtatttcgaaaagaattgtgaagttgaaaaaggaaaatggtgatggatatatcagaggagttggagtgaagggactagtggtagatttggtcaaaaaatactacatacatatatgaaattctcaaaccataaattaaaaaataagagatcagagactctagaccacagtagtcacagttattagtaagtagcatgggtatattggataatatgtcactaatgatggcctcttgtaccttcttagaatatgacctactaactacagagtaataatgaatgggacaattgcataacaaatagcatgctaacttccaagtagtctcatagggaaaatgggctggagaaccatgtcagaggatcacctgcttggtgagcctgatagaagagtctgcctagctgctgctgttatctcatctctttagctgttccattgctgggtgtttggttttttaatcttttttagtgttgaaatggcacagaacctttcaccaaatttgttcactttttccaaaatgctaaagtgttgtggttccttgaagcagaagcctgattgagcactttttaaaatggagaatccaatgggactgtaggttggagcattctgaaaacatagatgatagccaaacagtctagattctgttgaatctccagtgctaattttagagacccagatttcctacaaagagcattaaagtccccataacatttagaagccttctgtgacatcttattttctttaaagaaaagagacaaagaagaaagatgcattaatcaaaaaatataataataataataattatgatgatgatgataatgtgcttggaaaaatacaaattgttatttaaccagagggtagaagtctcccaggaagctccttaaataaaatgtttacattcattttttcatataaaaggattcatttgacagtgcattacaaaataaaactcaacactgttgatgatcccagctggagtgaaaggatagaatgcagaccaatttattaccaactggttttaaaaagttataggccccaattcaggagaaagggaggagggaagaggttctgagcctagcaggtagaaaactcacattttctgatcatcaaaacatgaacaagctttgtgctcagcactcacagaaattttgttttttttttttaaactaaaaccaacttcagggcaaataaacccaaggtcctgttcagagacatgatgctcactgaattctgcaaatgacctgaagtgacacagcccatcaaaggcagacaacctttacatgacctcaaatccaatgaatggagcattaagaaattctttacactgtatttacactttttcaagtacaagcaggcacaaatggaaatgatgtaaaggctctttccccacacttctgattatttgcttggatactaattcacaaaatacaaatacttcagggatgtggtaatggctgagtgcaagtgccaaggcttagagccttcagtgacttgtttttttttttctcctgtgaccaggcaatttcctatttcaccttgctgaaaaagtgatcagtgcaggattaagtacactcccagcagagaccaaaggattagctctggcttttataaattgtggctggtgcaggggatgcaaccttcgagtttcttctctgtggtcagaaatgggctagaatttggcaggtttttttggtcccttgcttcagggttggctctgctcctgcctatgatcttaaacccagtcgaagtcacaataatgctcacattatttctgaccctcggaggcatctgaacttgtaatccctggacacgatgctctaaaattttcttccagttcccacactctatgatcctttaatttagagttactgaaatatgtacccagatctgtcaaaactttaaaaaaaagtctcaaatttttaaagaatagactttatgatctactgacgacatcaatcagtatttgtggaaaagggaaacagggatgtgacatcgccctagcacttaagtggagtgaaatttcatattctaatcaccaagcagttgacacatgcctacagacaccaatacctgagcatggccctaagctacagcactgagaaaacatagtggcttaacactcttatttcctttactcacaaggaagcacttcatcccatctgtagattaagaaagcatccttagcctctaaactggtgatgtggtgtcttagtctctgaaaattgacagatgagttttcaaaatgataataggttttttctgtaaaataaaggaaataaattgtaacatgtcaaaaattccttcccatgtccctttgaagaggaactgccttaggagaagagggagttttattgcttatttacaaaataaaaaaattactcatcataccccagagtctcaggcaaggtaaaatataatctgtcataacttcacagacaagcaaacatacacacttgcacataattaaaaaataaattataaaatttaaataataaagtattttcttctctgccttaagaactgcccttaataaagtcaaattgttcctcttaaccctaagtacagaaactattctctaatttgatgggtatcatgcaaaatttgtctctcttactacacagtgatactctatgccattgcctcaagactttgactcttaggtgtggtcagtgctgttcagtaagcaggtgccactctctagaaaaaggggctggtaccattatccttgtcattattttggctgaatataaggacactcccagttctgtcaactgatactttctaatatgatttcattttcacataaatgcatgagacatcaagtccacagggcaaaatgtctcagaatattgaagaaaatgcatatctcagaacaaacaaatatcagattcaaaggtggcttgagtcacttacatttgtggtctgtctctggacttctgaactgcacagctatgggcagctttctattgaaattgtttgaatgagtgccgtcattgtgaaattatcaaatatctcatatgagtattatatgtcttcatttctctgcttcctatgctggtcagattcctgacaaaacaactttaagacatatctttgaatcagttccacagtctctaaccacttgattcattatttcttggcctgtggtgagcagaacaccacaaaagcgagcatatcatggagtgatgctgctcaccctgtggagccagaagccataaagggcaaaagacaaatacaccattagtgggtacatccccagtgatctacttcctccaactagtctgtacctgctgaagtttctggtacctcccaggaacccatccagccacaaaacattagatctattaaagattagagtcctctaaggaccagttcatcaatatgtgaactttcctagattgttttggagagattgttatccccaacagaaaaaaaaattacatattaagcaaactgtaattcaaatgtaaagatggaagtgacagctggaaaagtcacttgtggagcaagagttcagacagggcaatgccctgagaactacaggtgccttgctagatatactcccacaatgccattcatgcaatatctaagcaatgctactgtctcttgaagttgcttatccaccttctctgctgtatagtgatcagcttctctatcggtttactcattcttagtcaggcaagacagaaatcctggagtctagcaagcaaatagtagatcactgctgagcaaacaaagacatgaaactaaggctgacatgtttgaattgtgacattgtctgaccttgcaaaaattcatcaagacacaactcctggctcgtgatctgaagctcactttttaacaagaaaactccaatattttaaacatgtcaccctttatccaaactgtcatttatagctgtccccaaaatcaaatatcctattcacttagtttttggaagatcttttctacaggagttttagggaaacctcttaaggttatcacagggaaaaaaccttcagcagattcagctgaaagaaaggaccttaggctggctggcatcacaatgatttgctcgtctctcctgcagccccatgagtaaaaccatcagatctccattgtgtagataaataaactgaagctgagagaaggaaagctgggctgaaggctagacttctacctccccaccccccaccacagcttttagcaagtcatttttggtgattatttgctacataagccaataaaatccaagcaagaatatgtactaaattcagatttattttttaaaagattctaataaacatgaattgcaaaaattttaaaataaggtccaggtttaaaatacaaaatattctgctttctatccaaataatgacattacagatgtaaaagcctttccccctgtcttaaaatcccactctatagagagctatgtaagctgccctggagatttgctacaagaacctcaaaattattttctctacatttatattttgatcccttgtggggataaagggcacacaaccttgtatcaggtttgaacatattaaatgtcataattctactgacaatatttgcttcaaactagctgggagatctgttccctagaatatgctcttcgtggaactctctgtttccaaactgggggaaataagagcattttcaatggtgggaggaagagaccaaggaatcataaagctattagtgatacaactatgcctgttgttcagatggatagagatgtccacaggaagctgagacttgcgactataatacttactgggagatgtgtatcatcttctatacctcagaatttctcactgaaatcctgttcatacatctgtttaactctccatctctgggaacccctgcagctaaatcgcctcagaaggtaatatctcaattgtccctggagaggtggatgcaaagctgagaggtcatcttgctctataaaaccaccgaatcattgacagcattgatatggggatacttacacaaatcttaattctttcagactttaacatggagaaaccaacctttattgatttgtttgcttagtttcctgtttgtttactttaaagatttttcttctggaacaatttggttgttttaaggatagacaagtatttttaaattggtccaccaaatgacaagccaacagatttgaaaccacttgtcatctcttattcaccacacctataaatccaactgggcgtgttttcccagtgtccctgcatcatgaaaagagtattgcaagaaggtaacttctttatgtagtggtgttttgttttatttttcacgtacaagggattagctatgttcagtgaaccaatttccttgcaattatttttataataaatctgacatatcattcattgttctttctttttctcaaatcatatgcctttcagggtttgatatggacagtcctgactcacctggactccatctgtctccaccaggatgctcctgctctgcacttgtcttcaaagggaagtaattttatctcctgttcctagatcacccaggtttgcagtatgactaagtacattctaacagctgtagatgagcctgagagttttactatcaatacaaattataaaggggagtcatcataaaaatcatcttcaaagatatttccttgcatgcttaaataccaccgaggagaacaggcaggaaagaaggcagtcttctgatatcctgggtttgggtgttctgattccttccttgctagcagaggcactaaatttaacactcagatttgctctgacaggctgacaactgatatcacaagaccacagctaagagtggtttattacttttagggggatttatttaattcagtctcgcagcctgagggtggggtaaagatttaacttgaaattaaattccagcaggagaccttttaatataagaaaaatgggcagaaggataaatgacatgctcaattgcaatgaatttagaaaaaaaaggggtgctatatttaacagcaaagaaaatcccaccaaatcatttcagttgtatgatagaaatagaaagtgaagatgaaccaggaatgatgatggaactcaaaaaataatatgctaaaggaaagtttctgtcacactaaaatcttttcatccatgaaggaagaaaaaaaaaaagaaaaaaaacctcccagtttatgagtgctttccatcaatgtctgagtaagttgattggaaaaaaaaaacacatatacacaagtgtttttctgttgttttaactttaaactacacaatagttcttgatgaaactgtagaattgaagcaaagccatgaggagcaataactgtggttttaacaaaaacacaagaatgtctacaccctaagcttcagaactgaaattggtcccttagaataggaagctgagaaaaggggaatgtttgtcctaacaagcaagccagacaggttctgtcaggaggagaacgggggagttcaagtggttgtgtttagaatcctctgcttgtctctgagaaatggatgtcactgacaaagagcatgagacagaagacacctcatggttggcatattctggagcgtttgtgacattctcaccttcctaggcagaatagttttggctgagatttcctgtaaaaagatgcactgtcatcaaaactattgatctggaatgcttcctttgaaagcaaatttgatttttcaggcttttgagatgcaaatgcttaaggaaaggatgggacaagaaaaaaatgaaaacaaacaaacaaaaaaaaacagaaggaccatttgcttaactctatgcagtccagacttgagaacaagaattcagacttcaccagcctgtgccccatgctctgtcttcatccctgcaccaagtatggcagctgattcagtcataaaggttttattcctaaccatatgtcatgtctgtacagcatttctcctcccttcgggaacccaagttgtcatggctttgttggacaactttgaaatcccacacatgcttgctatggtcttttcttctccctctttattcataaaaccctttgctggttcataattggcatgttgcctctcacctaaacacagcatacctcataatgtctgacttcagaaatctaagtctgtgtaattgtttttatgccatccctttaaaaagaagatttactagtttggcttacatgaaatggtccaggtagtccaggaatggctctctcacacaggacaggctaaggatgtactatttgttcagtccacaaatctcagcagttccaatctggcgctgaaggcctgggggattcatggagagctaccatgggccttcagtctacaacagaatcctaaaggagctgggtgttattggtgatggcaaattgcagcaacaggagatgaacttctcagtaagagtataggcaagcaggcaaataccatcagttacttctttcttgatcccaattaggttgagtcttccaacttcagatgctgtgatcaagaaaggccttcacagaggtgcccaaaggcttgagttttagttgattccagatccagtcaagttgacaaccaagattaatcatcacagaagctaaggaaataagaaaacattatatgtagtgaatacttaggtttaaatgccttcataatcacacatcacctactgaatactgctcaaagttcacaaattttggaatacttttgggttctaccaccatctttaaatggaacacaaggatcattatagtgtgtgtgtgtgtgtgtgtgtgtgtgtgtgtgtgtgtgtgtgtgtgcactcagtaagtgaaagtggatgtgttcttgaaggccagaggacaaccttgagtgttggtgtttgcctttcatcatgtttgagacagggcctctttttttatatacaacaggatagttggtccacaaatttgccagacattctcctatctctgactcccatctcccattaggagagctagtactacaatatgtccactatcacttatgacattatatagatgctagggattcaaactcagggcctcgaacttgcatggcaagtacattatctactgaatcacattccaagccctctaatattattttaagttcaggttacccacaggctgctcagcagcagcacacagtttgaaaattcagtgagtaaaccaataaagaaaaaacttcatcttgtccaagaataattctctcctttccctcttcacacctaccaccaacatgtgggaagcctcctgactttttgagttattattttgcactttaagtagaggctttatttatttactttagaattataatcttctgacattgctggcttatttgctctgcctatggcttgggaggcaattcctcacatatggttctgtgaaaactaatcagacattattttttaattaatggtgttttatgtactgatgggtttttcagagaagagttaaagtcattaagcaggagctgggtgtgcactcaaagcaatattcctgagtgatccgataattgagatatcaccttgctttattctacagtgaagcagaacctaagccctgtctgctgaacagcataaccagattttaggttaattagctcccaagtgcccaatatgtatttataccatcaaaggatcgaaggtccacgtttgagtgtatctgaagcccgagtatccgtctgttgaaatgaagtgtgagcgtttaactcagacacttctctgccaaataaaatgtcaaatgtttctgaaggggttgtcctgatgcatccccatgctgaaacttcgaagggagacattagaagttgctttttcttatctttaacccaggggcgttaagtaacactctccagaaattctttaagttaaaacactacaacagaagctgtctgtgcaaagattatacatctcttacctagaaaatacacttttgaccaaagactataatgtagaaaagatactaatagttcataatggcagataatctatttaaaagcttctgtcaagcaagttagttagaaaaaaatttagctcattcctctccctaggattgttctagtgttctagggactaattgaatgccaagacactgagaaagagaaaatgtttgtccccaggtattctgagcatacatttctccttgccttgaaaacattacagtccaacatccctttggtaataagtcccgctaagggtcacaggaacttttctgcaagaatatacaatctccaagtctcattgctacttacctccagaggacggctgtccacatggttgtcaagatgcctctgtgaaaggttcacccacatggcaaaagacagtaattatatcagaaatacactggtaaaagacaactccttccctgtgggactataaattagtttgtccttggaatatgttctcttatggaaaggatagaatgtagggaaaagtatttccttaagaagttgcccagagcctggcattcgtgttgcatgcctctaattccagcactctggaggcagaggcaggcagatctctttgagttcgaggccagcctggtctacagagtgagttccaggacaggctccaaaacaatacagagaaaccctgtcttgaaaaaaaaaaaaggaagaagaagttgcccacaaacacagtaccctcaacacacaacaaaactgtcctcttattatttttttcgagcacagtttaggattattcaaagcccagtaaactgacagatgataatttccatttccaatcttcttgatgtatgtttcttaatgggaagtaattcttaagaagcttctaagttcaactcatgtggtggcttggctgtaataaatccccaagaaaacccagcctttcaaataagaagcaacaaagcctcatcaaaattagtttcagtaaaactctgttcatagattttgggaggatgtgtttcagttctttctctctttgaagaaacaaaatcttgaaaggcacaccttattctccctgccctctttttcaccataagagatcaagaagtaactaagtgaagacaaatgtgaacattgctaatgtttagaaaaggacttaggaaaatgatgaataagtaatgcaattcaacttcctttcaataatggaagccttttaagacaaagtggggagcagattgtctggagtcccagttgtaagtggggatacaatgaaaatccattttaaaatatactgttaaaacagaagcctgtacaaaaataattcatcttaagttaatatttatagtttatctatcttttatactcttcccagttctaaccagttttaccataatctggaaaagaggcagtcatccatctacttccagccactgtaggtaagaggcattcatagccatacttagcagtggtgtggtaaccagaaacgaatgttagtgaggggaacttaaaaaggcctgcctccttccacagctttctgcatggctgttgattgcacttctgtttcttttagccttgcttctgcagcccaaagacttttacagctactaagctgtttgcccaagggtcctaaaataaaccttctatattttccttagaaattccctctaggatcttacctcaagtttctgtcctttcttctttatcaatagttttcagtattgaggtaagtaggtaaagaagcaattttaaaactttgaagtcattcacactatgattttagattcactgtggtatttgaaaaagtcaactttgggttaaattaaactctagtgagaagaggatggtgtgagacccagctccaggctactcagaggcattataggatataagattctatttgcgtgaggctttacttacctcagtgaactaagggctctagtttggaaagaccattcatcacttcaagtaaggttcaaatttttcaggaacatggaaattaataatagtgagtaaagcaatttattctcagtatgatggcaaggtcatctcattctttgtacatgtatgttaatggggaaagcaatgattacaggttggccctctgtgaggaaatgtataaccagatggaagtttgggatggaggactatgtaaataacagcattctggttacccaccccaataatgggaagtcaagttgatgcttgagtgatggaaagggccattgtatcccaagacacatcttctcatcatcagttgctatgccctatgaagctgtcttcctagtactttattctagttactgccttcccattgccattgacctacttggtatgtgatattggacaatagcattcatcaatcaaaagttaggtcttcttatttataaaataaaactaatatttctgaattttgttgttaaattttgtgacataaaagtgatttaagatagtcagctttcaagatacaataaaaaacctttgcaaatcaatataaacactgaattaatgcttttactgaagtaaatttcattattcttaaataattttgcatcccaatatccttcctacaattttgaaccctacataaattattgcccgccttcccatccagctagaatgaatttcttctattctcctatttcagctttctatataccacattaagttttgtcatgtcctatgttcaatagtcttaatttatagaagacattaaaaaatcatagtcaggaaaacatagattaaatttttcttctacttcccatataggttacatcttaaaactatttccagataaaacattccttaatcatattagtctcaagaataatctttctttcttggacaattaaatttactatccagtatcatagctagaatatatatatatatatatatatatatatatatatatatatgttttgctaatctatttgaaaaaaaattatcccatccttcctccagttcaacctgggaaaagtttcaaacttcaagatagcataataaggagagagaaaccctcaccttatctctaaatttgaggggacagtgtgactagtgtgatccagtcactcagcatctagcatctcagagcactggtgcctctattgcaactttgggaagagataccgtatcaaatctgtgcactgttatcaacaaatataactgctctacttccaaatgaacattggatatgaatagcatgagccagggaattatagtttaagaggcatcatcattcattctccatagtaaacattgttaaacaggacaacactatggctaacagcagcccaattagaaatttcagacaggaacacctttgtaaatttagaagtgagacacacttaagcatggttttttaaaaaatggaatgcactaggagaaaaaacatggctggctcctgtaaatttcatttatttatttatttatttatttatttatttatttatttatttggtttttcaagacagattttctctggatagctttggagcctgtcctggaactcaatctgtagatcaggctggccttgaactcacagaaatccacctgcctctgcctcccacatgctgggattaaaggcatgagccaccaccacccagctctaaattaatttttaatgtccctaaagtctttgagaaaggttggttcaagaggtctgtttcttacataaattgtaactgtacattcccaacatctaatttctaatatgaaagtgacctgtgagctgtttttcatgttttgcttccagctcttttctttttcattttattagttcattgagaatgtctttaaaaatattcaattcctgaccccacccctcccagattcaccctcctccactatcaacctacctttaggtccacattttttaaatacagttggtgctgcccatttactctcggataaatagacccccactggttgtggtcaactcactagaggctacattcatacagaaaactaacactctcttagcagctatcaattactaataaagaggggtagaactttgtgcccactgccctccctctccatgttggtattttgtctaccttgaacttgtgcatgtcttgtgcatgctatcacaaccactgtgaattcatttgtgcacctttttctgttttgtgaagaaaatactggttccttgtaataatccaatgcctcagactcctcccattccctatcctttgtaaccctcctattctattagtctcctttaatcctttataacgctaagttctatttcccttccactgaaatccttatgaaaggcctaaatagttctagatatggccccccaaaactactcacatattgtttaaaaaagtcttcttcttcttcttctttcttcttcttcttcttcttcttcttcttcttcttcttcttcttcttcttcttcttcttcttcttcttcttctttttctcccaggttctgtgacaagaagcactgaggacaggccacttagtgccccattcccagcagctgtatcaattctaaaattataactaatcatcttctatgcttcaagccttgggctgtgtgtttgtgtgtgtgtgtgtgtgtgtgtgtgtgtgtgtgtgtgtgtgtgtggtggggggtgtggttttgtgagtgtgtggtgtatgtgtatgtatgtgtagtgtggtgcgtatgtgtatatgtttgtgtgtgtttgtatgtgtgtgtatgtgtatgtgtgtagtgtgtgcgtatgtgtatatgtttgtgtttgtatgtggtatgttagtgtggtgtgtgtgtgtggtgtggtatttatgtgtgtgtttatgtggggtgtagtgtctgtgtagtgtagtattctgtggtgtgtgtgtggtgtggtgtgtgtgtttatgtgtgctgtgtctgtgtttgtatgtggtgtgtgatgtggtgtgtttgtgtgtgtgtgtgtgtgtgtgtgtgtgtgtgtgtgtgtgtgtaagtgttataactgaattcaaacatgcctcaaaaagctattagtgatcctattattgttattattattattataacccaagaactgttgtcatttattataatcatttacataaattatcaagaagcagatttcatattctctcatttctctctcagaagaagcatattagatttttctattttatttttcaagcaataagtattctgtcttctaaatcagacttactgttctttctcatttgcgtagtccccttgcaaaatctgaaactaatgaatacttatgcaccttactcactgagtaaagcataatcctttatgagctgatctcatagtttgcttgctctgtgatgaaaactttcaaagtttcccaaatttaaatagcaactacattatgatctcacaatctctgtgttagaaaactgggcaagactcgtccaaatgacattcttaatttatgtgtcattcgcagccatattgcaagcatcagccttggatgggctctgaagaatccaggttgactgactccaggttggtttcgtgtcttggaggttatggctacaagactggatcaacattatcattgtctggagtgcccacaaagagcaacctcaggctagtaagattttttgacatggctagtaaggccatgtcagggtcaagcctaacttttcagatagacttcttatgacccagtttcaatgtgccaaacactatagtcttgtactgttctgtcaagctattacattcagccagattcaagaaaacagtatcggactccacctcttagggatcgagattcaaagtgtttatgatcactttaagtctgcacaaaggacttccatttattgagtactttctgaactactagtgcataccaaatgctttagaggtaagggctgcaaatctgaggataaaacaatgcacactaaaatgatgagtcctgtgctgctcttggatttcttcatgtcatctgttgggtggatagtggcaggaatggatggcttgttttctgcaggcctcagaataagatgattcataggcagtaaggaacactatttagctgttcaactctttctaggcaactagcacgcttcctgcatgttggattttaataccttacattgacaacacaagcagatccattttgtttctggttttgtttgtttggcttttcagtttgccagcctcatccatgttagtataatatataccctaaaaacatttgtagtttggattaaagaaacaatttgatttccaattgtactgtttttaaatttcaagacctacatacccttttaaaacttgctaaattcagaatgtttattaagcttcctactgcagtatagaaatccactagagtattaagtcacaatgacagaatttttatttacccctgaaaataaactgtgcctgtgtagcctgtttgggctattcttgatgctttatttgttttatttctgtggagcttgatcaaatgaccagaggaaattacttgcagtattggagtagcctataacttcaagttgattccatgtttttctgatgatattatataaattcagtgtcaatgtattacccaaaagaaaatcaattgttataacaatatgaactcaagacacaattataatggtgcatttcaaaaaacatgatcatatgtttaacaaataaaaatatggtaaatttatgaagttttcataaaataatgttaactttttaaaggattattttaaacaatattgcttttaaaggaatttacaaagagcaggtttttgttaccatagggttttattattaaggtatattttgttttgtttgtatagtgaaatatcacacaaaagggaaaccagtatagggaaaagtccaactcctcctttatagaatttaaaaccttgcaaaaattaacacatgttgataaggtccagtgtgtgtgtgtgtgtgtgtgtgtgtgtgtgtgtgtgtgtgtgtgtgtttatgtctgtgtctgggtttctctttgtgggtctctctgtctctcagtctgtctgtctgtctgtctgtctctctctctctctctctctctctctctctctctctctctctgtctctgtgtgtgtgtgtgtgtgtgtgtgtgtgtgtgtgtcagtgtgtgtgtgtgtttgtgagagtgtgtgagatatttaaagttgtaagtaggtgttgctcaaggcactgaaccatgacataacatggctttttaacttttttttcttcacaaaaatctgaatattaccaatctaccattgcaaaatagtctaagaacaagttttggacatttaaataaaatgccatcaagtaatgatgaggaaatgatatctgattttctaaaacttctccttagaaaatgtcaaagaaaaaaatctagcaagctctgcaaaaaaaaaaaaatactgttcaaagagctgtgatttgtaatagaataagaacaagattgttccacagacttttagacttgtagttaatgaaattgcatagatataattcgtttcctatttagcaactatatttcatttattttatcatctttatgaaaatactttatagatggctaaaagagtacttcaaagaagaaagtggtcactttacagacatcaatcataactacaacaaattgaaagaaaataatatgatatattttaatttctatttttactctcaaatttcttaactttgaaaacatataaaactgaatagtgcttcatatgttttgaaacctaatttagtttaaatttccaagtatgtcacactgtggaagccctacataaatgttgtaaagattattagattaattctccctagaaaattttataattctgggtgaatatagtgatttgaacacttacccacacagatctatgtattagaatcttgtccctgttaccatggtatgaaggtaaaagggcttcttggacatgatcagatcatgggtctacccttggaagtgagtatgttcctctttgtgatagattatttcctaagaaactggttgctacaaaagagcaaggtgggtccatctccactctcatatctcctctctcaactgtgctctctttttcacactctctcaacttgggcccctttccagacattgccttcagaatcattaggctttcccatcattggccaaataagcttcttttctatgtacactacccactgctaattatttcactattctcatgggaaacagactgaaataatgataataggctaaataaaaacaaattaagaaatttattcaagaaaattaaatgcttgtccatattaataagcagatcttaacaaattccaaaagtcagtataattcaactcacaattgatatacaatttccattaaaatattgaatatgaggtaacacttgaatttcaagtataagcatactgtattttttagtataagcatactgtaatgataactttctgccagccgcctgatccctgccaccacatgggcacccaaagtaacacacagagattaatattatttacaatgctgctggccaatgactaggacttcttatatgctaactcagccttaattatcaaccataactactaatctatatattttataagaacttaccttattggacactagtggcaggcgtcttctcttgccgggatcacatagcagcaccacagagaagagagagcgattttctgcttgcccctgcttatattctgagtctgcctgctatgtcacttcctgcctggatcacaagacttctctttagtacattttccagaatcctcctcgacacctagtcttgcctaacttactttggccaacagtactttattcaacaaccaataatataaacatactcagaaggacttcccccatcagcatattccatgcatatttgagtcatgctgtgaaggttaatcttgtttgtcaccttgactgaatctgtcagctaagagacatacaaacttatggttctgtgagtgtttttcccccaaagtcccaaagattaggttaggaaaataagaaataataggaaatgaattcaaaatatagtgttaatatttgggctcaaagcaaagaaaagcaaaagcacataagggaagaagaaacaggaatgaaaagaaaggaccctcactaccatatgtcaaagctattgtagaggtctggctttaaacatgggtgtactgttgcagaaatagacacgtagggctgtgaaacaaagtgacaaagagaggcacccttgtgggaagtgcagcatttgacagaggtgacattgtaagtcaggagtcagtgctgagttttcaataaatctcacttagtatgttacttcccccaatggaaaataaattctaattattccctaatgcttcatggcatttctttgtggaaaagttaaatttttaaaacaccaaactctggaaaaatagattatttatttgaactcaacatgagaaagatctgccataagtgtaacatggatatttatattgttatatttgtacaaagggatgaaaaataaattacaaattttaaagaagagactcaaattagaacatggtgtttcattacctgtggtcaatggtagccaattattgtcaaaaaccaataaacataagtaaaaataacagtggaaaaatagatctgagacaccaagaaacaataaaggaagcatatttatattttatgattttatattaaaaatgaaaatttgtccagtttcattaacaactaggtaaatgcaaggtaaaatgcaccagattaacaagaagaaccaaaaaacgttcatatgataagtattgtcttagttcacacataactctatgccaaaatcagttatatgactatggaaaattgataaacacctgtggcacctcattaatgtactaatggaagacatgcagtaattaatagttatcataagcaaacattaattttgagttaatgctctcaaggtccagagaatcaagtctgaaaatttttaagcagcacatgacatgttaaataaaaacaaatattagcagggatgtgagcagataggagctctccatccctgcaagcacaggtgtatactgtaactctaatctggaagtcaacatgaacaattctaggagaagtcaatgtgtgtaattcatctcttaacagacagaatacaatcctaaaaatgctatgatttcttctgctgtaaagttctgtagctcaaccacacacacacacacacacacacacacacacacacacacacacaggcacacgcacacgcacacgcacactcttctggcaaatgtcagtcaatctgttaatctaaaacagagtgtgcaagttggcatagaatgcttgcttttcccaaactttctgtgaagtctctgatctgtctttttgcttccagactgttgcagagaaaggacatgtaacagaagaacctgttcctgaatgtcttctatgtggttacttggcagcttttttttttcttttgcttctaagagggtattttgaggggttggggctggtaggtggaggcgtggaatataatggcatcttgccttgccagtaaagttgtggtggtggccacacccttagggcatggtttcaggtgcagatgtgacccattataagatcgaagaggggctgcagagagcgtcaaaaggacaaagactggatcttctggagcaggaagactgaggtatttatttactcttatctgtgtaagagcttccctaataaatacctttttatcatctatctgggatcttgtggactcgtttaaaccctgccttcaatggagaatatcattttgggtcttgagtgaaaacaggctccaaagcagaggtacaaatgttttctatgattatgcctgtggaagacaaacaggctaggacaaagaagtgggcagggaaagtcttcagtttgtgacacgacacatacttataaaggaagacaaaaatgaaagaaagatgctgatgataaacatttgaaaacattttgtcaaatctaggtagaaattgtggccccattaggcaaacaacacaatatcttcctatgtctgctagctcagacacttgcaaggagatacctgggaagaagatagcattggtagaattctactctgggtagaatctgaaagatgctacagatcaaagttgccagctatctatactattcatggcaggtttctgtcacaaagcgatctaaacagactgcatcctggctccacaaaaggagctagcactgatctcactgacccagtacagcaatgggttggctattaacttttctgtttgtacaagctatcaatgcatcttcagttcttcaatgcatttgtaaatccatcagagatgctaggcttgtgattggatctcaacaaatgttttcattctaatgaacgtatttctaactatttttagttaatttttatatccatatcacagtttctcctccatcctctccttctcttccctccccccacctcctctgggccccactctgtctgctcctcctctgtttctgttcagaaagtggcagtcctcccatggtgtcaacaaagcttggcatatcaagttgaagtaggattaaactctgccctttgtattaaggctagacaaggtgacccagtatgaggaagaggttgctggaagctagccaaagcattaggggcagaccctgctcccactgctaggaatcgcacacgtagaccaagctatacaactgtcacacatatgtagagggcctaggtcaggatccctagctgtcagttgagactctgtgaccctttgtaagcccaggttagttgattctgtgggttcccttgtaatgaccttgacacccctggctcccacaatccttactccctctatctagtgggattcttggagttcatacaagtgcttgactgtgggtctcagcatcagtttccatcaactggatgaaggctatttcccacattctcttctattttcattgttttacatgcctatatacagttaagccagcagtttttgttgaagacacgttccttttaccattgtataattttggcttctttatcaaaaagcaggtgttcataggtgtgtgggtttatgtcagggtttgtgacttgagtccatagatccacgtgtccatttttgtgccaataccatgctgttttcattacgatagctctatagtagagcttgaaattagggatggtgataccttgggtagttcctttatgtacaagattcttttagctatcatgggtgcttttgtttttctgtatgaaattgagattgttcttttgaggtctgtgaagaattgcactggaattttgatggggattgcattgaatctgtagattacttttggtaatattgccatttttactatgttaatcctactgatctatgagcatgacagatctttccattataggatgtattttccaatttctttgttacatgaataagaaaaacccagtgacaggtattggggttcaagctgaagatcagagaagcaaagcagctggccactagcaggatctacctcaaggtgaaagggctgtcatgtcctcagtgaggctggagaataaatctctgagactgaatactgaatgccctgctcctatcttacatacttctctagaactgagcttaaagacatggggtcccacatgctgagatctcctctgtgtgagctgtttctcttttagactgattcattctaatgtaaccctgggtggccttgaactcacctagatccatctacctttgtctcttgagtcctgggattaagggtgtgtgccaccaaaacctgtctgctattgctagctaatatggctgttgggattaaaggtgtgtatcaccactnnnnnnnnnnnnnnnnnnnnnnnnnnnnnnnnnnnnnnnnnnnnnnnnnnnnnnnnnnnnnnnnnnnnnnnnnnnnnnnnnnnnnnnnnnnnnnnnnnnnnnnnnnnnnnnnnnnnnnnnnnnnnnnnnnnnnnnnnnnnnnnnnnnnnnnnnnnnnnnnnnnnnnnnnnnnnnnnnnnnnnnnnnnnnnnnnnnnnnnnnnnnnnnnnnnnnnnnnnnnnnnnnnnnnnnnnnnnnnnnnnnnnnnnnnnnnnnnnnnnnnnnnnnnnnnnnnnnnnnnnnnnnnnnnnnnnnnnnnnnnnnnnnnnnnnnnnnnnnnnnnnnnnnnnnnnnnnnnnnnnnnnnnnnnnnnnnnnnnnnnnnnnnnnnnnnnnnnnnnnnnnnnnnnnnnnnnnnnnnnnnnnnnnnnnnnnnnnnnnnnnnnnnnnnnnnnnnnnnnnnnnnnnnnnnnnnnnnnnnnnnnnnnnnnnnnnnnnnnnnnnnnnnnnnnnnnnnnnnnnnnnnnnnnnnnnnnnnnnnnnnnnnnnnnnnnnnnnnnnnnnnnnnnnnnnnnnnnnnnnnnnnnnnnnnnnnnnnnnnnnnnnnnnnnnnnnnnnnnnnnnnnnnnnnnnnnnnnnnnnnnnnnnnnnnnnnnnnnnnnnnnnnnnnnnnnnnnnnnnnnnnnnnnnnnnnnnnnnnnnnnnnnnnnnnnnnnnnnnnnnnnnnnnnnnnnnnnnnnnnnnnnnnnnnnnnnnnnnnnnnnnnnnnnnnnnnnnnnnnnnnnnnnnnnnnnnnnnnnnnnnnnnnnnnnnnnnnnnnnnnnnnnnnnnnnnnnnnnnnnnnnnnnnnnnnnnnnnnnnnnnnnnnnnnnnnnnnnnnnnnnnnnnnnnnnnnnnnnnnnnnnnnnnnnnnnnnnnnnnnnnnnnnnnnnnnnnnnnnnnnnnnnnnnnntcttcctttatatgttacttgacctttatcctttgcatctcttaatattcttgtttttttctgtatgtttagtgtttatattattatgtctcaaggggaggtttttgttttgttttgctttgctttgctttttgtctttgttgttgtgtctatttggttttctgtaagctttttgtacttttataggtatgtcctcctttatgttgggaaagttttcttctgtgattttttcaatatatttttgtgcctttgacctgtgtatattcttcttctattcctgttattcttaggttttgtatttatatggtgtcccagatttcctagatgttttgtattagcaatttttagacttaccattttctttgacagatgaatctatttccttcaacactgagattctctcttccatctcttgtattctgtttgtgatgcttgcatctgtagttcctgttaacttacccaaattttctatttccagaactccctccagttgtgttttatttattgcttctatttcaattttaaactattgaactctttccttcacctgcttgatttttttctcagattcctttaaaggtatttattgatttcttccaaatttttgtttgtattttcctcgatttctttaagggaattttttatttcctctttaaagtcctctatcatctttataaagttattttcaaagtcatttttttgtgcttcagctacttaggaatattcacgtcttcctgctgtaggatcatttggttctggtggtgccctattgtactttttgttgttcaatgtatttttacacaggcattcacacatctgggtttgggatgttatagttctgggtattgattcttctgttgtctttgttggatgggtgttttgttcctttattatctgtttcctttattgttctctggcttgaatggctaaggattctggtggttgtcaggtgttgaggtccaggagggtgtctcagttgagggttgaggaggtttgggtgccaagatacagtgtattctctgttcttctgactggtttgggctgtacctgtgcctccagagtctattcttccaactgatgttggctgtacctgtgcctctgggatctgaggagtttcaaggagggactggccaagaggaggatggtgaggtgggtgggtttgggaggcagagtgggtcttggaggaacaggattcattaagtggaggcagtggtggtacagcctacaggcaggtctctaacctgctggcaggttgccaactttttacttttgagattataaaaaattacatttgtcctttacagttcatccctctatatcctcccatatacccatctttcctgtctttaaaatccaaaacctcttttttcattaactgtaaacacatctctagatggtcacataaaacgtccttctccagactagacatctgataacactaccaatatttcaaactcccataatctttctgttcaagtctcatctctcaaagtgagtatctgtaaatgggctaagacacaagtaactccccatctctctatcacacatcaggtcatcagaaactagtggtccatcctttgttctgacagctgctgaaaggttgacttcttttactcgggaacgacggcagaaaacctcaccctcttggatacaagtcattgtacattagcgttctgggactgcagaagtgctccagggaaatcctgataaatttcttccttaaagaaagaccccctccatccctgcaatgtggaatgttcctttaaactttgtgaatacatgtcattatgattggtttaacaaagaagctgactgatcaatagctattctggtaaagcttaggcaggactttcagacaaaaagagagcatggagaaggggaagaggcttgggagtcacaaggagatgcaggggaaatagggagtgaacttgtcatactgagaaaagttaccaagccacatagcagagcatatataagaaatatgagttaatttaaaatgtaagagtcagctactaagaagcttgagctattggttaagtatttataattaataataagtctctgtatggttatttggaaattggctatcaggaaaaaacagtctgcctacactgccatgataagaatgtaagcacatcaacacacgttttctcaccagaatccatattctcaccttcaactctttctcgagcctcatttataggacaaaggtgggtacccacatgtaagtcaatatcagtggtcattgcctctaaaagtcctgcttcaacccaacctgacataataaaatgtacactttaatacagtcttgaaatctatgtttctggcacacttctcaagtataacttgttaatgtttattaaggcattttatggaattggggaatgtattttaaaattaaaataatataagtagctatgaggctaaataaacaaacgtatgtggtaagttatatgtaccaatgacttcccatttttatgtgtatgtgtgtaggtctgtaacactgtgtatcaatattgacagcttcttgtagatgccaagaggtcgtattccctggaagttataggcagctgtgagacaccaaatggaggtgctaagaaccaaattcttgtcatctggaagagcagcaaatactcttaaccaatgaggtatctctccaactcccaggatttcaaatttttttaatcataatgacttggaacccttaccaaatcactacccttggaattttggactgggcatatctagtctgacccccaagaaaaccacatttccaaattctgcaaatgtcatggggttccaaactgacactttagcaaaatctaacttatttcaattagatgagatacacagatgcagtcctctacctgccgcttgaggtgagtctgggcactgctctgctcccttcttccccatcaccctttgcttgaggagactagaagagagggagagaccccacctatatccactggaaggtgggatggataaatgacagagtaagaacacactcaacaacagaaaaaccaatatgactccaccagaatccagggactccacaccagcaaggattgaaaagcccaacacagaggatgaagaagagatggaccttaaaaaaaatcttatgaagatgatagagtccattaaagaggaaacaagaaaatatcttaaagaaatagaagaaaaaaacaagcaaaaaattacatgaaatggaggaaaagacaaaccagaaaattcaagaaataaacaaatctcttaaagagtctaaagaatgccaagaaaaaacaaccaaacaagtaaaggaaacaattcaaacagttcacggtttgacagcagaattagaaataataaggaaaaaaacagaatgaggggatgctggaaatacaaaagctgggtaaacaatcaggaaccactgataaaactataaccaatagaatacgagaaatggaagagagaatctcaggtgtggaagactcattaaaggatatttagtcattgaccaaagaaaatctcaagtccaataaatccctaacacaaaatatccaggaaatgtgggacaccatgaaaagaccaaacctaagaataataggtatagaagaatgtgaagaaattcagttcaaatgtacagaaaacatatttaacaaaatcatagaagaaaacttgcccaacctaaagaaggatatgcctgtgaaagtacaagaagcttatagaacaccaaatagattggaccacaaaaagaaatcccccctgccacctaataatcaaaaccccaaacttacagaataaaaaaaaaatattaagagcagcaaaagaaaaaggccaagtaacatataaaggcagacctatccgaattacactgaaatctcaatggaaactttgaaagccgatcctggatagatgttctacaaatgctaagggaacatgaactgccagcccagactactgtatccagcaaagctttcaatcactatggatggagaaaacaagatattccatgacaaaaccagatttaaacaatacatatttacaaatccagccctacagaaattactggaaggaaaactccaacccaacgaagataactatgctcaaaaaaacataggtaatagataatcccactttaccaaacaccaaaagaaaagggggggatccacacgtactaacaccaccaagaaccactccaaaacaaacaagaatcaacaatcaatgatcattaatatccctcaatgtcaatggtcttaacttgcctataaaaagatacaggctaacagaatggattcaaaagacagaatccatccttctgctgcatacaagaaacacatctcaatgtcaaagacagaggttacctcagagtaaagggttaggaaaagacttcctaatcaaatggacccaagaaacaagctggtgtaggattccaaatatctaacacaaattagacttcaaactaaaatcaatcaaaagagatgaaaaagggcatttcatactcatcacagaaaaatccatcaagatgaagtctcaattctgaacatctatgccccaaatacaaaggcacccacaattgtaaaagaaacattactaaaattcaaatcacacatacttacagtaggacacttcaacacactgctctcaccactagataggaccaccagacagaaacttaacaaggaaacaaaagaactaacagaagttatgacccaattgggtttaacagatatctatagaacattccatccaaacacaaaagaatatactttcttctcagcgccacgtggaaccttctctaaaattgatcacatactctgcaacgtagcaaacctacatagattaaaaaaaattgtaataaccccctttatcttatcagaccaccatgctttaaagctagaattcaacaacacaaattgcagaaaccctacaaactcggggaaattcaataatgctcagttgcaccattcctgagtcaaggaagaaataaaaaaaaggaattaaagacttcctagaatttaatgagaatgaaaacacaacatatccaaacttatgggacactttgaaagcattgctaagaggaaagttcatagcactaagtgctcacatgaagaaactggagaatagtcacactagagaattaacaccacaactgaaagcttagaacaaaaggaataaaactcgccccggaggagtagatgccaggaaataatcaaactgaggactgaattcaataaagtagaaaccaggaaaacattacaaagactcaatgaaacaaagagttggttctttgagaaagtcaacaaaatagacaatcctttatccaaactaatcaaaaggaaagagagagcatgctaattaataaaatcagaaaggaaaagggggatataacaacggacactgaggaaaacctgagaatcatcaggtcatcctttaaaacctgtactccacaaaatttgaaaatttaaagaaaatggacaattttctggatagatatcacttaccaaaattaaatccagaacagataagcaatctaaacagacctataaccctaatgaaatagaagcaatcaccaaaagtctaccaaccaaaaaaagcccagggccagattgtttcagtgcagaattctacaagaaagtcaaagaagagctaataccagtactcctcaaattgttccacttaatagcagcagaagggacattgccaagctctttctatgaggctacaatcaccttggtacccaagccacacaaagatacaattaaaaaagagaattacagtacagtattcctcatgaacatcaatgcaaaaaatattcaacaaaacactggcaaatcgaatccaaaaacacatcagagaaatcatccaacatgataaagttggcttcatcccaggaatgtagggatggtccaacatcaatgtgatctaccacataaacagactgagaaagtaaaacctcatgatcatctcactagatgctgaaagcctttgacaaaatccaacaccccttcatgataaaggtttagagagatcagggataacaggaacatacctaaacataataaaagcaatatacaggaagccaacagccaacatcaaactaaatagagagaaactctaaaatcaggaacaggacaaggctgtccactctctccatacctcttcaatattgtccttgaagttctagatagagcaataagacaacaaaaggagatcaaggggatacaaattggaaaggaagaagtcaaattttcactgtttgcaaatgatatgatagtctacataaatgaccccaaaactctaccagggaactcttccagctgataaataccttcagcaaagtggcaggatacaagataaactcaaaaaactcagtagccctaatatatacagatgataaacacattgagaaagaaatcagagaaacatcaccctttacaattgacacaaacaacatcaaataccttggggtaatgctaaccaaaaaagtgaaagacctatattgtaagaattttgagtcttttaagaaaaattaaagaagataccaaaaaactgaaggatctcccatgttttggataggtaggatcaacataggaaaatggcaatcttgccaaaagcaatctacagattcaatgcaatccccatcaaaatcccagcacaattcttcccagaccttgaagaacaattctcaagaacattatatggaaaaacaaaagacccaggatagccaaaacaaccctgtacaatacaggaacttctggaggcatcaccatccctgacttcaagctctattattgagccatagtcctgaaaacagcttggtattggcacaaaaatagacaggctgaccactggaatccaattgaaaaccctgatattaactcacacagctacgaacacctgatttttcacaaagaagctaaagttatacaatggaaaaaagaaagcatatttaagaaatgatgttggcataactggattcagacatgtagaagattgcaggtacatccatatctatcgccatgcacaaaacttaagtacaaatggatcaaagatcataaattcagctacactgaaactcctagaagagaagttaggtggtacccttgaacgaattggtacaggagaccactttctgaacataacaccagtagcaaaaacattgagatcatcaattaataaatgggacctcctgaaattgagaagcttctgtaaggccaaggacatagtcaacaagacagaacaccagccccaatgggaaaagatattcaccaaccccacatctgacagagggctattcaccaaaatatacaatgaactcaagaagatagccaccaaaacatcaaacaatgccattaaaaagtggagtacagaactaaatagagaattctcagcagaggaatctaaaatggctgaaagacacttgagaaagtgctcaacattcttagccatcagggaaatgcagctcaaaaccactctgagacacgatcttactcctgtcagaatggctgaaataaataacaccaatgacaatctatgctgaagaggatgtggagaaagagaaagactcctccattgctggtgggagtgcaaacttgtacaaccactttggaaatcagtatagcagtttctcgggaaaatggaaatcagtctaccacaagatccagcaattccactcctaggcatatacccaaaagatgtacactcatacaatacggatatctgttcaactatgttcatagaagatttatttataatagccagaacctgtaagcaacctagatggccctcaactgaagaatggatagagaaaatatggtacatttatacaatggagtactactcagcagaaaaaaaaatgtgatcttgaaattcgcaggcaaatgtattgaactagaagaaactgagtgaggtaacccaatcacaaaaagataaacatggtatgaactcactcatatatgatttttagacatagagcaaaggattaccagtctacaatccacacttccagagggggttggagaggaaggaggtgggaagggcagaaggggatggggaggagtagaagaggactgagacaggggaggaatagaggagggcaaaaaaggagatgccttgatagagggagacagtacaggtttggagagaggtctggcacaggggaaatgtgaggagatccacagggatgaccccaactaagaatccaagcagtggtgaagaagatgtcattgatgcccttctcctatagtgagattgttgtctaccttggttaccattcctagagccttcatccagtagctgttccaagcagaaacaggcacccacagctaagcactgaaccatactcctggaatccagttgtggagagggaggagggatgagcaaatgagccaagatggtgctggagaaacccgcagaaacagttgacctgacctagtgagagcagggaaaccctaattataaagctggggaaacagcattggaccgaaccaagccctctgaatgtgggtgccagctaggaggccaagacagtctatgagacttctaacagtggagccagtctttatccctagagcacaaatggactttgggaacccattccctatggagggttactattgcagcccagatacagcaaggagggcctaggccctcccccaaatgatatgaaagactttgaaggtccctggtggagggcctcactatccctggggaagagttgggggttgggttgggcaggttagtggggaacatgggagggtgggaaggagagggaatggaggtggatatgtaaatatgagtattaattaaagaacttaaattaaaatagagatacacatgcattttgtgctgtggattccttgagttctaataaatccagtaacaattgaagtacactcaatataacccaaacatggaacccctaacttagcagcacagtacaccttgaatagtttcctgcttcttgcaattttgtgcagtgttagtgttatggttccctgatgtcattcagtatgattcacacatcccagtatcataacagatcaaaagtgtatagaaaatgagaacatcatccaccactagtgggaataaaaactgttccagacactctggaattcagtatggagaatcctcaaaaagctaaaaagtaaatctaacatatgacccagctatattacgcttcagcatcctattccacagatgcttcctcaacaatgttcattcccatgctattcacaatagccagtggaatcaatctgaatgtcctttaactggtgaatgataatgaaaatatggctcttatgcacaatgaaattcttttccactgaaaagaatattgaaatcataaaatttgcccataagtaaattgtattagaaaaggctatatccagtgaagtaagctacaccctgaaagagaaatgctacgtgttctctcttctatagtttctagttccaattcatctaatgtaagtatataacaaagattaaccacagaaactggaaaactgtaaagtaaccaatatggtccctagagatggaataggaggattcaggtgatatgaaggtgtaaatggggaaattgggagggatactttaccttgggaaacgatagtgagatcattaaaaaaggaaaagaagaacagagtgaaaaacaatgacaggaatgtttgacaaagcctcaagaaatcgtattattttataattacttaaaattatataatatattgggatgaccatgcttcccacaagagctatagactatctaatcaaacatgagacccctcaattccaattatttgtcaaggaagtccaagtgactccctagatatgtactgttgctgttgtctttggttgcctctcagaggttgaaggtaagggggttgggaacgtttagggggaaaggaaagaagatgatcaaactatattgaatgaaagttttaccttattatattttacttttttatcttttttgttgttatctcttagaaaccagttcttttctaatgagagacagaaaaaagagtaggtccagatgggaaagaaggtgaggaggagctaaggagtaaggtgggggaatacaagcaggatatattgtatgagaaaagaatctatttttaataaagggggaattttctatttttatttaaattagaaacaagcttattttatatgtcaatcccagttccctctccctcccctcctcccctccccccccactatcccctatcccatcccctttctgcttcccagggaaggtgaggccttccatgggggaattttcaaagtctgtcatatcatctggagcagggcctagaccctctcccctgtgtctaggctgagagagtgtccctctatgtggagtgagctcccagagtccattcatatattagggataagtactgatctactacccccataaattgctgaggcctcctcactaacacccatgttcaggcggtctggatatgtcagtatatatatttatgtaaaataatcatattactttaacaaaatgcaaaaaagaaaaacttgtttaaaaatttaaataaatactttaattgcatatatttttcaacaaagaattcaaggattagacacataataaaacatccttttgacacattaacaatggaaaccactatatcatacatttcaaagataaaaccctctaaatgacagtttcttgattcagtagtatttaccatgacaataatttaaaataataatgataacagccaccagtaatatgaatggaattcaatctgatgagtttttaaagttttcttgttttgaagtaattcatggaaaatgggcatataaggcagcaagcatctctgcaagaacataaagggtgtctatttcagatttattagtaatatagggatctgcttaaaatgtttttgaaaatgcagaatcatttgtggattccctaagttattcaccttaatgacccactgaacaaaaaatgtcacagcagagaactcacacttgaagtcactagcatttacatttacatgttgcctaataacttcttacataccaacatacctcaagaagcaatttttaatggtggttccataaccaaagtgctgcatcatctagtgatgtcattgctattcaggttatgtgacttcagtgacagactgaataaaaaacaatagatctcaaaatgtgtccctacaatgctgtatttggaaagaacgtatttactaagcaactgccagaaggcctgtgtgccagagattccgtgtgggtcagggacaagtaggaatgcttgatacaagatgatatcgatgagaggagagaggagccaacttccaaaagacataggtaaagttggtaattttgtttatgctactaaagccttgactgtttctttgaagaagttagacatggaaactcaacgcaactgcctagactgtcttaagatgcttgtttagctctcagttcagtaacggatgtgattcattactgtgacaccaaatgtgtatctgttattcacagtccttttaaaatatgaaaaagaacattaattttccctaatatgactatatcatctttgtcaggtccatctaatttgggatttcaaattagaaaggaaattgtcttaagtaggaagtcaatggttcccccatttgcttggctatatgcacaaactatattctctagttatcctggagacctggtcatttagacttctctagttagcaatctacttttcaatggaaaggaaaagaaaattctctctagacattgggttttaattaaaaaatactgagctccaaatccttctaacagaaccactgattttcgttttaaaatgttattaagcattgggtttttgtctttagacaaagccaagttaaagcattgttaacaaaaactgttgctgacttcattaatgactgtttacttttgtagtatattataaaccaatgtttccccttcattgtcttttaaataacttttcaatgtttttcatgactgattatatccctcccagcctatttttcctatacaaactactgatatggttcttactttggtatcttctgctaacaccccaactcagctgaaaaacagacagacccaccatggagtatttcattcaagctgggcttggaggtagtagtgggattgaattaaaagtaaaactgtgaaattcttctattggctgtatgcttaacagctacattaattaaaaaaaacagactatttctgtgaatttttctcactgcaagtggcaaagatgaaatcagaagctgatgtaagtcccatgcaaatgatttttattgaacatatactgctcacattttagggactgtattctacctaaataatgaaggagtatgcaatgcctgccaaaccccacacaatgttaaaaaccctacttagtgttttatctttaaagagaaagctctgcatcctttggcagctgatgagttcagatagaaaacatgccaggagtgtggaccgatgcattagcacacgcacacacacccccctgctgcatagctgtgcctcatcacatgccataacattggcaagcagagcccagagctctttaaggagcacgaagctcataaataatggttgaatcacacaagggataattaaatgagacaactgaatgccaatggactccccagcagtaaatatcctccatgaggagcttcctgccactgctttgtttatttttttttctttctcagttttagctctgagtaacagttcattactgcagatacttttcaaatggaagtgccttaaaactcctcacactctcagaaacattttgagacatatttagcaacatttctccaatgcctattgagtggtacatatatcctcattttaaaatattttagcattaaccacactaatctaataagatacacctgtttgacgaaccagacacacataacaaacctgaaaaccaaaaggcaaagaattccagaatggcagaatcttgctcagttgtgaactttatagtgtgactggaatttgttcattcattcttttcatttagggtaaatatgcatcgatgttataactgcctcctcattcttaaaaagaaaaaagattcacaatgaatttcaatgtttctccaccaacctcctctctgagttctttttcagaaatacttaatgtctttggcttgacagctttgtgctcaaggttggcaggctatttttagttccttgagtattttaaaggcttgaaaacaccctgctctggtttgcttgtttataaaatatatttagcagacaattacagttcatttaatatgttttcattgctgtctagggaaaaaagcctttaaggtttttgtttttgttttttttggggggggtaaatgaagagaaatatgaacctttgtcccatggggccactagggtgggacatgtttaccaaacccctgagaactgggagaaatgaaggaagcagcccttacttctgaatcatgagagagattaggtgactagggtacctattctgacccatttttatttggtagaaacaagataatcctgtacagaaatgtacagctgaatctcaactgcaggcagactttacagttatgcaaatgtcctcactgttgctttggtcagttatcagatgctcattagtacctgtaacatcccatgcctgtggtcagttctgaagttaaacatgcaaaaagaacaaagttggcccttccctttcttggcggtagcctcaagaaataattaaaatagtactgaaggagtctaactgataaaatatcagggcatggagaagcttgttaaaagatactttatttttcaagaacatacatttattttaaggaaataaaagaaaggtattgtggttttctgcatgaaatctgactaaataggtaaggtaactgaatgagattagaccataaccactactgtaaaaggaatctaggaaggcactaatgaacaaactaataaaatatgatggcagttagagagaaggaaaaagatattttttacaaaacccagtaactccttactcttaggaaatgcacatcattgattttagaaaaaaaatgttgggtgcgtacatatcatctgcaatcaaagaattcagaaaagcaatgttacatatgtttatattttctgtaagaagaggatataaatgataaaaccaatggtgttaaatattaacaataggtgagtatagataaaagatgtattatttactgtacttacaatttctctgtaaatttaaaattataaattctcaatgaaaaattttcacacttgctcaatgtgatgatggggatataacgtgttctaaagggaccttggtgcagaaattagcactcatgatgatgcacaatagatataggagagaaaagaacagtgtgaagtaagaaaaaagcatccttagcacaagcatttatgaaggttttacagtagctgagtgcctagaccaagagaacccaatgtgacaatacagagtgactgagaaaatgggctgaaaggatcatgtagggaggccagagattccatatatccagccataagagttggtaagtttgaaaaggggaggatggatagtgcaatacaattcaaggcagaggaaagacacaaagcaaatattctaatgttgcaaaaatataaaggagtggtagcaggaacagacagcaagatagattagcaagtaaccatgcctcgcagcctgaattcaatttcctaggacctcacctggtggaaggaaagaactgactcctgaaagctgtcctctaacccccacacacacaacacacacacacactgcagagatctttgaagggtgaagtttgatcttttatagaaagaaaagcaagtctgagattcaaatggtaccgacacacccacacttccctcctcccttctcagaatccagctcagttctagtcctattccatctattaatgaagaatatggtaagaaggggctccagactggggagccagggcacccagtgtctgctcagtcagtctttgaagctggaagcttgagaagaaaataaagtctcaagtctgagattaagtgctccaaagcaccctggagagtttctgctgaaagtctaggttcagggtttaggtatgtagactcagacgaccacaggaaacaagtgtggggttgagaattcactcaggaaaatgactgttagtgtgccttatttttctccttctgctagttcatcaatccaggcatccagtctattgagccatgctttccacattcacaatggtcctccccacttgggcctttgaccaaaatggcactctactctgaaaatacctttacagagacacatagaagcaagctaatttcctagaaatcccttcatccagtcaagttgccatcaaaattaaacatcatgataactgtccatggctctttatgatttactcactgagctagtaatacttcattgtgaaatttttaataagtattactcatgtaaatattctggagcaaaatatgctaaaaagttttaaatttgcttaaaaataaggaatacttattaattatcaagtcctcttttcatattttagaatttaaaaccctgtgataatgtcatcaaagaagcttatttttgcatcagacagagactattccaggatacagagaacaaccactgaaccactggttcagtgaccagtaccagtttatgaatctacaacacaacatctgaaattcagaaaacatggaggacgaggaccaaaataaaataaaattaaaaaaagactgtaaaagtcagagaaccaggacctctgctatgattctgtatgaccagaaaactacaaccaggaactctcaaaagtatggtcactgaacaagacctgtacaatgacactagttgacatgctggtgtgaacaggggaaagctcacaaagccccagccctagatgaacagctgcatgcatctaatgacttttgaaagggaatcagccatctccaaggatgagtctctgatagtctatctaatccacatatcccttcctaacatatgaacagcactaactgaactcagtgggccatattcacatgtgagtgtgtgtgtgtgtgtgtgtgtgtgtgtgtgtgtgtgtgtgtgtgtgcagcaataataaagaggaggtcatgaatttgagatggagtagggagaagatggagagagagaaggagaaatggaaatgatgtaaacacaacattcaccttaaaattctcaaataattttcaagatttaaatgaaagactaataaaataaaacctttccacaaagccagtaatgcagaatattttgtagatattcagggccacaaaaagcattcttctaactaaaattttacccctatattggaaaaatgaataacaggagcaatctacacagctttgccatcaaccatggtgcctccttgaacctacctaatccattaacccctttattttacagacatggagaacttcaagtgaggatggtagcctggaactgctaagaattcagacaactctgagtcctctcaagtttgctatgtattctaccagcattaactcgaaatgaagctcaaaaaacagcatatatgcttgattgattcttattaggacaatgaaaagagttctttatttacatatagctgaaatcagttatttaaaatgctgtttttgctattttgattcactaaagcaaaggcaataagacaaaggttattagaatttacctatgttatcagaaggttgaatccaagagtttaattaaaatttctttattttttctcataaagatatatatatatatatatatatatatatatatatatatatgggcattggtggtatatgcctttaatcccagcacttcagaggcagaagcaggcagaattctgtgagttcgaggccagcctggtctacagagtgggtgccaggataggctgcaaagctacacagagaaaccctgtctcaaaaaacaaaaaaaaagaatatgtaatgagtgtgattaggataatattaactctgtatgtccattcacaaggctcatacacttacttttcatcagcgctggaagctgaaacaaaaacataaattatcagtgaatgattgcatgtttaattttctcatttctcacccctaaaatgccattatagatatactaaataaagaaaactcaggtcaaaacgtgttacccaaggccaatgatttttttctctaagatttcaaatgacctgcaaattgttcagtgcatccccatgccttgactttgaaataaaataagtatgataactttgaaggaaaaggcagaaatcacaaggccacagtgaaattatagacaaggcagcagagtggccatggtctgaatggatgctgaagacaagctctcatttttttgtgcaatttttgagtgttgaactttaaccactcctacatgaataattagtcttgcaactcccaccccttcccttgtgtgaattcacacaagatcctttacttgatgatttagtctttctggaagctctgccctgcccacagtcatcaggctacctcatccatttcaacagaaacttggaagctactgcaagataatctttttgtatgatttcttcacctggagaaattagttgtgttctgtgtagcccaggtaacctgaaactggtcaggctgagcttcagatttgtttctggtgctctacttgaatgcatccagaagaatcttcattttaagaataaaactccaatgtaaattggttttagccctgaagacctttactgatgctgagcagtggtggcacatgcctttaatcccagcacttgggaggtagaggcaggtggatctatatgagttcgaagccagcctggtctacagagcaagtgccaggacaggatccaaaactacacagaaaaaacttgtctcaaaaaaaagtttactgacttatgaaacccaatgctgagaagaaaggttgtctaaaactaaagttgtatcagagcttctcctcctctgaagcagattccacaggatacttccctgctctaaaacctcatcctcagatcaagagccccacacttaatgatgccttcctttctgaggtatgtagttagggtgtttgttgctgcaatgaaacaccaggagcaaaaataacttgggactatagctctataatagagcttgaaatcagggatggtgatgcttctggaaattctttgggaaaagatgttcaccaaccccatccaagagagggctgatctccaaaatttacaaagaactcaagaagctagtctccaaaacaccaaataatccaattaaaaagttgggtacaaaactaaatagacaattctcaatagaggaatctaaaatgtctgaaagacacataagaaagtgttcaacatccttagtcatcagggaaatgcaaatcaagacaactctgagataccatcttacacatgtcagaatggctaaaatcaaaaacactaatgacagtttatgctggagaggatgtggagaaaggggaacactcctcccctgctggtgggagtaccaatttgtacagccactttggaaatcagtatggtgatttctcaggaaaatgggaatcagtctaccacaagatccagcaattccactcctaggcatataacccaaagaagcacattcatacaacaaggacatctgtttaaccatgttcatcgcagcattatttgtaatagccataacctgtaaacaacctagatgcccctcaactgaagaaaggatagagaaaatgtggtaaatttacacaatggagtactactcagagggggaaaaaaacaatggaatcttgaaattcgcaggcaaatggatggaactagatgaaaccattctgagcaaggtaacccagtcacaaaaagacaggtatagtatgtactcactcatatgtggattttagacatagagtaaaggaatacctacaatccacactgccagagaagctagtaaacaaggaggaccctaagagagatacatgatcccctggaaaaggggaagggacaagatcttctgagcaaattgggaacatggggaggggggagagggaactaggggaatgagaagaggaaaagaagaggggtgaggaagacacgttggggcagaaaggttgagttgaacagaagagagcaagataagagataatatagtagagggagacattataggtttaaagagaaagcaggcactagggaaatgtctggagagctacaaagatgacaccaactaacaatctaaccaacagaggagaggctacctggaatgccctctcctgataatgagattgatgactaattcatacgccatcgtatagccttcatccagcagctgatggaagtagaagcagacacccacagctaaacgttgaactgaactgaaatccagttgcagagaaggaggatggatgagcataggggcccataccaggctgatgaaaaccacagaaactgctgacctgaacaatggagagctcttggtccccagaccgatagctgggaaagtagcatgggactgatcctgaccccatgaatatgggtgtcagtgagaagaccttggaaatctatggggccctttatagtggatcagtacttatccctagcaaaggaatggactttgggagcccataccacatggaggactactccccgagcctagacacaagggggttggcctaagccctatcccaaaggatatgacagactttgaagaccccctacagaaggcctcactctccctggggagcagatagggtatgagataggtagggtgttagtagggggcggcaggggaggaggagagggagaggggcctgggattaacatgtaaaataatattctttctaataaaaaagtaaaagaaagtaatccatattaaaaataacttgaggggaggtaatgtttcatttggcttgcaaatttcaagtcacattccatcactaagagaagtcagatcatgaacccaacacaggaacctggatgtaggaactgaagcagaggccatggaaaaacattgtttaataggcttgcttctcatgacttgctcagtcttctttcctatacaacccagggctggcataagcagtgagattgggcttccaacatcaaacattaatcaagaaaatgtcccagaggcttacccacagagcaaccaggcggggacatcttttcaactgctgttttctcctctcaaataattctagcttgtgtcaagttgattaaaaaaactaatcaaggcatgagggctactgtaacaaagtaccacatattgaaaaatgaacaattactcatttccttaccttctggaggccaagaagctcaagatcaaggtttatttcatcctgaggccttctcctcacttgtaagatatatgttttatccctatatcttcacatgggctttcctcccaagtttctatgcttccatatatttatttaataaatatatgtcatgccacattaaagtctgtcctaataaccttctgtaaacctaactttttaaggaaattgtctccaattacagttcagatctgaagcaccaatgccttgtccttcaaggcattacatcgtactagttactaatgctgtgattaaacaccaacaatcttggatacctcttctgtgtgctaactctgaggaaagttaatcaccacttcttaattaccactaatttcatagctccagctcatcaccagaaattgacccaataaagcaaaggttttacttcagtggttctggtcttgttaaaggtggctgatgcttcaacccaagttaaccagaaccacaaattctcaactcaaagtagaaaaacatacagtctttaagggactctcaaacttccctctagaaattcaaagagcaggtctccatcatctgccatctgcattgctctcagcattcttatctccaaaactcacaaagaaaagttcaccagcctttgactactcaatggcttttctaactaaagatttccccagtgcttctaaaatccaccccaaaacaatatgatcaagtctgtcatagcagtaccccatgatcctggtacccatttctgatgcagttggggttactactgctgtgatgaaaaattaccaaagcaacctggaaaggaaagggaatttttggcttacacttccctatcaatgttcatcattgaaggaagtcagtacagggcaagaacctggaggcaagagctaaggcccagtctgtggaggggtcttgcttgcgtgttgatcatggcttgttctgctggaaatcttatagaactcaggaccaccaggacagagataacaccacacaattgtctggaccccaaacatcaatcactaactaagaaaatttcctacagtctgatcttatggaagcattttctcaattgaggttccttcctgttagatgattctagattgtgtcaagttgacataaaaatagtcagcatacaggtcaacctgcagtggtactgatgaggtgaatcaatagaaacttcctgggaaagtaatagtaacttctggcactatcccttgtagaggtcccagcaatcttgttgctgtcttgttagtatttaggagttacatatctattactgaatgaagataattgggttagattgccatctttacccatccttgtatatgaacaggaactaagagtcacatgcagaaaaaaatagcagattcataaagatttaaatccttagagagaagtaaggatagtagacaaccctaaacaaaccatctacattaaactaaaccaccagaaagtttgtcaaaatccttcaagcaatagataaaaaaatcactatactgtattaattatagtattaactcaggcaagaaaacagaagcagagggtatagaaatgctcagaaataaattattcatctatttattattgctttataaactacatgttaattataatggggaaaacatctggcaggggatcattttacccaaaatgataaaatttagcaatcggtagaacatggaaataaccagaactctaatcctgtctgctattgcataacttggacctgaacctcataaaattcattcaaaataggaccaattttttcttggatagacagatgttttcaaaaatgtaaaaatcacaaagacacaaaaagaacaataactgactgtagaataatgataataagtcaacatgacaaattaaatgaatcacaattcacagctaaatatggaatcaaataaacagcaacaatcagaaaaataccacattcacatggtagatgtaattgtcaacagtaggttcccataggatagtatcttgttaggttgatgatgggggagaatgcattcttattatgcaattaatgctaaaatatgtcagtatacatgaatgctaaaaatgtcatgtatcctcatactggtttattctgaaggagtttaataaaagcctttctgtgaaatacaatgagtgctttgatgtttatacactcttgaaatgtttagtcttttctggtgtcaagcaactcttggtatctgatggttccatgaattttattttcctttaataagagtatgagatgggaatgatctgttattgttaaaagatctataactttcacaacagaaaactgaacatagaaaaagttgattcttcatctaataagtagcagtagaattaaaggaagtgtttaacacgccgtataaacatttattagatgctaaagacccaacatatttatcttcattatattttaagacatttcaattattttattggctacttaaaactgtggtttcttataccacttcctatctttaagtagtatttagtagtatcttcttatggctttttatatgaaatcttatctgtttctgtgaggaagtaatcaataaggaaaagggctgaattaatagaagattagtcagtttattttaagcagaacaaactaccaaactgacttaaaaattcaagaagtctcatttctcacacttcttaaaactataaggacatccatacttatagtggttatgtatttatagcaataaaagttataactaaataatttcctactactctgaaaatctaaaatgtaatactttataagtatcaagatattgtcatacttcttagaggtaaagaagtgctttgcttttgaaatttaattttaaattaggtacttgaaaatacagctgaacttcacaatgcacctgtacactcaggcccacctctgattttataatatacaccaaataatttgttaggctaatccatgacaatggtgatttgcttatgagaaatatgacagattcactatagtgactctatgtttacataatagccccataaaagaaatgtaatataattgtcccagagacaacaaaatatttctaagtttctacacttttgtagcagtctacttagcttccatctactgtttctttcattaacctacatttgtcttttttgttctttttaccaaaaatatacactgaaatcacattatatattatcactgctttaaagcagatatttattaattcactcagtttttgaatgatagtatcagttttgaagatttgtaaaataatggaatgtcacatgaaaattgactacttaatgagaaacaatattttattacctcccacaattatgaaatatattctgaattacatcagacaactttttggttattaaagatgtcagttgaaaaatgataccatatgacaactgggctaggatgtccaagattcacattcattcactggctagttgtactggttataggttgaggtactgaccaaggtcaatgactgaagtgacatcctcttccaacagtgagtctcccctatgcatctctgactcagtgtagtagtgtctccaaaaataaatccaagtttgaatgttgtataacatcattatttcactatctacaatcaaagcaacaattatagttaacattagagggaaaactcagaaacaaaacccaccgtatttgctgttttggtatgttaaatactgcaaaatacacatcagtcacatgaaataatctagaaggggacaaatagaatcagtattttaaagtgttttctttatggattatgtcaagaagacaatctagaaaacatcaatgaccctaagtattcgtctcataaagttattctaagatgtttaagctttagtcaaagttatagtagaaataaaggataataatggtcaggtttaaaaacagaaagcaaatataaaaaaattatgccaataaagtgaaagttgcttcaatgaaaagaatataaaattttaaattttctaaaaacacttctcaaaaacaagtaaggaaaataaagcacaaattatcaggacccaaaatcaagaaggagccaagctagagctcttaaacatgatggcactgggctggggatggtttggggaaagcacttgcctagctcctaaggagccctggatttgattgcagctactttttttttaagcacagcaaacactaggagggaattgtgagagtttctttcagagcctgagtagaacacaaagcttggcactgtcacctcctctccttcacattatgctacagtgcctagccaatggaccatggctaaattaatgaatggggaaggaatttagaatgaagatttgcaatgtttgcaaatgatataatggtttatacagaacattcatgggaatctacagaaaaataattacaataatgcatacatttggcacaaattcaagatgtacacacaataccaaatatcagatttatttgaaataatatcccaaaattttggaaattatttgttatatttaacttattaatgcatgtatccaaaatattatctacatacaaataaaactagtaaacatgcaaataactcttacaaatattgttaggaaaaccttaaaaatttgtatttatattcatgtttaaaagcagtattgtaattagttcttacaaagttgatgtataaatttgaatcagttacggtaaaactataagcaaggtttgtgactttcagtgtgtgtgtgtgtgtgtgtgtatgtgtaaatgtacaaatataaccataaaattttatgtaagaattcaagaatatagaagccaacatttcaaagatattacattttaaagctaaatgaagcaataacaaccatgtgcaaggaaagtaacactggtacctgatggaacagaggccagaaacagacagtcctctgtgaatactagactaacgctaaatgtgccaatggaaagcaacagtgaaagacaatctttgattacatagtgtaggatccatgagatatacatcaagaaaagagaaactttgtctctgcttcataccaaaaaaaaaaaaaacagacatttcaatgactagaagtaaaaacaagcagaaaaaaattacatttcaaattctttgtgatttttttatttttataatagtaattagaccaattttaaattagaaacaagctttttttttcatatcattcccagttccctctccctcccctcttaccctgccccccaccccctattccaacacctttctgctcccctgggagggtgaggccttccatgggggatcttcagagtctgtcatatcatttgaagcagggcttagaccctcccctgtatgtctaggcttagagagtatccctctatgtggagtgggctcccaaagtccattcgtgtattagagataaatactgatccactaccagaggtcccatagattgcccagacctccaaattgacattcttgttaaggggattgagataagtaaaattcttttaaaatgttgacagggaggtttgagaaaaacaaacaaacaaacatgatcaaatggacccagtaacactgaacttttggttatcaaagatctcaaaccaaaaaaaaaatcatctcagctagtattgtctttcatgactgaattcagtaggggaggtgataattctcataacatatttaccaaataaggtcttattttaatttttgaccaaatcatgtactattcatataatgaattgctatgtactgttactttaaaatgtaataatactgcaggatattttaaatggtaagattataatatttctcaaaaatatcaagttaattcatatgcaagtctatgaaatatatttctgaaaagaaactcattaaaccacaaaatatatatggttaaaaaaagatctcaaaccaaaacatagcaaataatagatggcagaaagtatttgcaacatatgtaaccatgaaaatgtttgtatccatagcatgtaaagaatcataaatctttgagttatgcttggagaggcacttcaataagaaaatataaaaatggcctttgaacatttttaagaatgcttatcttaacaagataaaaaatacaaatgaaagctacaaagagatgacagagtgtgcacatttaaagactggagttaagagttaacactaatgatgcttagtgttgttaggaacaaacactctgaactatcatgaaaggccggtagttaagtttttcctcttgggaaattgttcagcaatatatgctaagatgtagcgctcccgatgactggtgattccactactagaatatataccagcattaaagtaaagcaatcaagagactagtaactgagtctatcttcacactttgagttattacataatagaacacaacctccctgagtatgataagtaaatattttggtatttttcgtactaaaaagcttttaggccaggagagatggctcagccatatactcactacacaaacatgatgacctatgtttggatccccagcacctatgtaataagccaggtacagcagtgcacacatgtaatcctagaccaagggaggtggatataggcagatccctggagcttactgcccagccagatagcctagtcaaatcagtgattttcaaggtcaagaggggacttatatcaaaacataaaatagaaactagacaagtacagcaaatagatgtcttgtagagcactttgttctaaatgggacatctataccactccatctaccctcaaggctcaggaactatcagagaaggagcaaaaacaatataaaagtcagagtttggggaggattgctgcaaaaaaaaaaaaaaagttctccaaacatagcaaggtattgcacacaggaactcatagtagctgcagcttccttcacaagacagagtcagtagaaattctagcattgatgtaggaggagcatttgacagcagctgtagaggaaaattcttctgtctttagagatgtaacatgtggtaagttcatgtgatagctctaaacccatgtacataatcacactcactggatgaaaacaaagagcaggatatgaaattatgagggggggaagatattgtggggtatctgggaggagttagaaggtggagcagaggagatgggaggttttgcatagattttctctgaaataaaacttccatcttggagagaagcaccttaaaatatagtcgttttatctagaaggtgaaaacatttcatccctcagggaagcttgataatctcaggcagtaagcagtgtaaaggcttctggaagtccctgaaactgaccagactaggtcactctgtcttcaagtgtatataagcagttaggactgctgactcttgggagatactctgagagaaggtgagctgcctagaagagtctcagatcagtagaatcaactggaaaaaattagaggcaccccaagccaccagggaaaaggagagatcagcttagctactggaagaggctcagaccacttgagctccccaagcaagacggtcttcaacctcttcaatagcttgcaggttttacagtgtgctccaggtatctagtgttcatggctgatactcattctggagtgggcttattagcaatgcaattgtctttaagtcagttttgctcctggaaataacctctcaccagtattgtgagtaagtactcccaataaagctcactgattcgccaagttccctggtgatattattattatgttgctctatcacagtgccctagatggtatgaggatgagtagacatttgttcacatctccccagaaacagtgcctcaagacatttgagtataagcaaagtacatttgatacatgtatgaaatacccaaggaataaataagatgtgtattttattttttttgaagtggagaacaattccagaagatatcccaaattaactctggccctctgtgtgcacatatgcatgagagctgtgggcatatacccacacatgatcacatatgcacgtatataccacacagaaagaaataaagactaaaaacatcagcagttacaaatagctgagcttcagctactcacaggcaaccatttgataagagccagtcaaaatgggatgcatcaatattccaagctatagaaagtcaatgaattttctgttgtgtctctgctaatcctacaatagcatgctgtttatgcagcaagacagaggtctctgaacctcttctggcctgaatttgcccaattgtatatcattccttggccaaatgatctcaggtaaaggtattttgggggggggttcgagacacagggtttctctgtgtagctttggagcctatcctggaaccagagaccaggctggcctcgaactcacagggatctgcctgcctctgcctgcctcctgagtgctgggattaaaggtgtgcgccaccaatgcccggcaggtaaaggtattttatctaacattcttattgtgtgagcagtgaggtatctcagcaagtaaaggaattttccaccaaagtggatgacctgagtttgttaactgagacccacatgatggaagaaaattgattccagcaactcgtctactgacctccccacatgtcacagactcatgcagacatgtggtccttgcttgtgaggggaaagggagacagagatatacacacttaaataaattttaatgtgttattttaagacacatataatttcaactgtgtacaaccaattgctaagacatatatgagaattttatagttacatcatctgcaatagccccgaatatgaaggaaccctaatgaaagtcagcaatagaactgtcatgcaaattataaaatgttcacttcattgagtgcatatggcaaaggaaatgaaccatgttaataataccaaaatttggtggatacagtaaacaaataaatggagctgttgtggaggttaaattatattattcttatgaggaatatattattttagaaagtcttgaaagactatcagattcttttaacttacatttcttttcctttcatactggagagttactctctgacattccttcttgctcataggtttgtaatattgatgcttttctgagctttaatgaatgtggtatcaaggaaagacaagaggcctaagaaattcaggatgaagcagctctgagttaggacacactggggcatctgaaagttaagaccatgcaaatggcagaagactttgcatgggaatagtcaagaagttcattgtcctcacagatcccccaagaaaaccaggaatgttaagcaggaaggactggttcttcaatggaaaaaatgtgaaaccttctatccagaaagctgggaactggaggtgataatagcctggtgatctgtgatatctggtaggacagatcatatcaagttatcacaaccaggaccagcggtggctagtcatccaaatgacccttgcattatctatatagccaggggctctcccaaccttccaaccaagaccaaaggtggtagccccaatgacctctacactatctgtattgccaagaccagggcagatccttccctaggtccttgagctaacacagctagcctatctccagaagccatcttcttcgaagaagtggcatgtgctatgagtagagcttcaatgtaattcgctttcttgtgcactggtgcttctgttacagcaggaaacttttttccaaattataatgtgtttaaatatcctggcaataacttctggaagaatcattttacctcagattatttcccttcctgccttgacactggattccctaacagtggacttattcacaagaagatctcccactccaatgaatggacaaagggcaaagaatattgggcatgaatgatagagaagcagcttactgcaacacagctgagaacattgagaagaacatattgcccacatctgtcatacgttcctattttataggcttggaaaaggagttatacccaagttctgggagacaaagatatttggttttgttgttgttgtttttggtggtagtttttttgtttatttgtttgttttcttttgttctgttttgattttccaagacagggtttctctgtgtaacagctctggatgtcctggtactcaccctgtagaccaggctatcctcaaggtcacagtgatccacctgcctctgcctctcaagtgctaggattaaaggcatgtgtcaccactgtcaggtgactaagacatttggaaagagctttcacacatgggtttgtgcaaattatcaattttattaaatgttattcagaccaagaataacaaatgcagctggtcttcaacgcatgtctgagagaagatttgtcatgaatgttagcagaaaattcttatgggttttgttttttaatatttaactaaaaactaagactttagtgaaggctttatactttgagatcagagttatactgtgtcactttctatgatatgactcagtcacccattctctctgcagccaatctcatgtctaaattcatattagaatatctataaaacagcactaacctgaagactgaaagctaatagatgaaaaaggacatacatcatataccttagtaataaacagccactcctaagtaatggttgatatttaaaagcacacacaggtatacatacacatgaacacaaaagcacatatgactcagagcattaactaaggagagctgtagcaagaaatcttatgaggagcacagaactttagttttggtggagctaaagatagggaatagggaatgagcatcagctaaatattaccgtatcaggtgctgcatagatgactccgcagttaagagcatgtaatgttcttgcacaagacctgggttcagtttgcaacaaccagatcaagaggctcatatctgactgtaactcgagttccaggggctctgatgcctatttctgacctctgtgagcacctgtgctcacaactatatactcacatccagacatacatatacgtgcaattaagaattaagcaaaaatgaagcattgttacaaataaattataatgaaaagaataaacatttggtggttcatatatagtatgtaatgcaactctgcattaccatgatgctattgaaatttcctttgccaactgacaataagattgcctatttataagtgtgtaaatgtcacaaaattgctgtttccatgagctatataaaatttttgctgttgttctgtgggctaattttcagacttgcaagtgctaatgtttagggttaagagttaactactttgattattttaggacatatctaatttcagaactgttctactgagcaaatcattcttcacacaggtaaacatagacgagacacttaaagcaaagggtgtgagggagaataagaaagatttgctgtcctccaaatgaatacacactttatccagacacacatagagttctaaagcctctcacaaagcactggcaattatcaacaaaatgtccttccctggagcatattgaaaaatcaaaattgggggttattttcacacttcccagtgttttcaggctttcactggtttttaaattaatagaaaaagtgtgacaaaataaatagaattattccttacaaaagcctgtttgaatgcccattatcctttttgacaataaacaacagctagaccattgaaggcttcttgatgttagtaaacacaattcttatttactcttccaggaataatttgtttaaaaagtaatttgtgtcataaaatatgtttaatcatctcagaaacagaataaacacagcaagtagcaattatctgacaaaaagattagatatcaagatataagaaagctgaagttaaatagctttcataaaacattttatgaaataacactgattatgtactgaaggatgtatagatatgcatacttatatggagacatgtattatgtctgtatgtatgtactgtagaatggaagttattgtttgctattattaaaaacaaatatctgcacatgcctatgcataaataatcatgacagttttttctactattatgactcgaagtgtatggaagaatatttgcaggccaaaaataaagcaatagaaaattataaggcatgatggctcatgcctttcatcctgagacaggcaaatctctgagctcaaagccaacctgttatacaaagtgagctccaggcaagccatagctcttgagtgagaatctatctcaaaacataaattcattcattaataaataaaaattataaaacagttgtacatataaaggattgacagctatgaatttctatatttgtgaaggggatgccggatacatttccctgaaaataacaaagcaaggctattcttgtggagagattttgtagcaaccaaaattggagaaaagaaatttacactttggctatgcccatttttttctagtaccatccatttgccttcgaatttccatgtcatttttttaaacagctaagtaatactccattgtgtaaatgtacatttgctttatccattcttccgttgagagagatctaggttgtttccagtttctgattattatgaataaagctgctatgaacatagttaagcaagtgttttgtggcatgtttgagcatcctttgagtatatacgtaagagtggcatagctgtgtcttgaggtcaattgattcccaatttcctgagaaactgccatattgatttccaaatggggctgcacaagtctgtactcccaccatcagtggaggggtgttcccatagcttcatattctctccagcataaactgccattagtgtctttgatcatagacattctgcaggtgtatggtggaatcttggaatcatttgatttgtatttccctgatagctaaggatgaacatttctttaagtatatcttggccatttgagattctgctgttgagaattctatgtttagatctgtaccccatttttaattggattatatggttgatttttgtttttttgacttctttatatattttttagttcagtaccatgtggaatgtggggttggtgaatcttctctcattttgtaggctgacattttgtactattgacagtgtcctttgccttacagaagctttccaatttcatgagatcccaattataattatcagtcttagtgtctaagctcctactgtcctattcaggaagttttttttcctgtgccaattcattcaagaatattccacagtttctattctatcaggttcagtgtaactggatttatgttgaagtctttgataaagttggacttaagtttgtacagggtgacacacatggatctatttgcattcttctgcttgccaacatgcagttatgccagtaccatttgttgaagatgctctcttttttctattatatgattttggcttttgtcaggtgtttatatgtgtgtggatttatatctgggttttttttaaatagattccaagatctatctgtctctttttatgccaataccatactgtttttattactgtagctctataatagggcataaaatcagggatagtgataccttgggaagttcctttattaagcaagattgttttagatatcctggatttttttcccatctggagttaacaattgttctttcaaggtctgtaaagaattatgttggaattttgatggggattgcattgagtctgtagattgcttttggtaagatgaccatctttactgtgttaatcctactgatccatgggtgggagatctctccaccttatgatattttctgcaatttctttcttcaaagacttgaatttcttctcatacaggtccttctcttgcttggttacagttatcccagtatattttatattatttgtggctacagacaataaattctctaatattttaggagtagtaactatcagttagaagatactatgaaggaagaaaaatggaatcataattttcaatttatgccttcttaagtaatttgaattttcttatgtgtttatgtattatctgtgtccatttttacttgtttattcttcttgacattataataaattataaatacaagattccccttcctctttggtcccatatgcctgctcctgcatcttttttcactaattattactatatcaagaaaacatcaaggccagcatggtctacagagcaagctctaggacagctaaggctacatagagaaaccctgtctcaaaaaaaaaaaaaaaagaaaagaataagaaaaagagcatcaccatcaagactaggttttaccacctgcaaatattttgtgttatttgaacaattgtctactcatcctagtcagggcatccaagacagaaacaagttgttccatccaagggcaattggtaagttaatgaatttaacggggctctctgtatttgagcactgatgagggactacttacagaagtatgggcaagtaagttatggcagctacatggagaaaaaaaaaaacaactttctccagaaacagttgtctctgtgtcctaagggtggggtgaggccataggagccctctcttctaataatgattaactgtgtataaatcctttgtgaaggacaggccctcaggaacacccacccctcctccaattacagaaagtcaatgggcccaatcttatcctcatctcctttcagtgaccacagctgcccacagtttcaaaaggcaacagcctagttatgccctgaaaacaacaaggcaaatataattgataccacagttttaacatttattccctcaacttgctttctctcatattatttacaccatctagatagttaatttagattttttattatatttacaggagtcatttggataggctgtacagggtacagtcaaatgtagtgcaactttgttaataatcaacacttttcaacttttcctttgcaaccttttctataattttaggatctctaatgtggcccctcgagttgccaagatgtagctatgggtgccaagtcagctcctagcaacaagatctgtgaaaaaacaagaccagttcctgtctgccaagagcagaccaatctctgtgtgtgtttctttctctgtcttttggtctctccctcccttccttccttcttttctctttcattttcttaaagtacagctagtcagctctgtcctctacctctctgtcctctgccctctacctctcactttttccaaatgtactagatgaagaaaataccttgaaatttcttagtaagtcacttgtgtgtctgagagaatggtaaagatacagcgcttgccagcttgaactgatgatcaaattttgcaaagaactcccccatttgactcatcacaggtaaactggcctccctgtaattcataagcaccttctttactcagaggtagaattaagaggaatggtgttgaacagaagctggaagaaaggtggaaggaagggtaccacagctctgcctgaaccacatcatggctctattataattctaaagtcagtctattggcttggggcttcatatttccttcagcaaagaataaatgggaataagaaagaactttttcatctttcttgtctcttgtaaagacccttagaggggctacaaaggaaatattccagtaatgactagtaatatctgtaaactattttgcctgtcaaagtcaatattctcttatacaaattcctcttccgtataattccagtaagactgtttccctcagcaaggtctccatagacctctctcacacctgtcaatcagcaatgtactgaagaacaggaatataacctaatctaaaccaactaataggagatttgagatctttgctgaaactatcagatgccctgaatggagatgatacagtataagcttgaaaatatagatagtatattttccatcttcatcttgctggagagggcattcaacacaaatagggcagatcttaaagattgcaaatggtcagttctacctgtttgcttctaaactatacatggatacgtttgaccacacgcttgtttgatttgtttaaaccaatgcaatttttaaagtatatgagtgttatttctaattttaacatatgtcctgacctgcaggatatcaacctggggcaagagagtcaaggatagggaatgggaacaagagatgcagaaagaatgatcacaagacaggattctaatcaagtggcaaactttacttttctcaggctagcttatatagtcagcagagcaggatatggggaggggcagaatgggttgtttgtgaaccaggtgttagtataggcaggatattaggaagccacaaagaggatgtttggcagaataaagagttcatgagtaagaggtccaggaagggttgcctagtgactgagcctgtgggtggaggactgggtcaagttgtttcttttcttgaactgaggttctaaggagctactacgtaaaggttaactatgtggcctgccaagcgtggcctaggatctcatgccaagccctgagatctttggctcccaacaaacatatatattaattgtataaaatgatgtgtttgttatgttttcatgcacacagatagtaaatatggaacatcactttacaacccatagaaacagtaaagtcactgaaagcccatgttttgaagttaattggaaaggaatagatgaattgtacaaggaagcagactgagactcagataaccatagccaaatggcaaatgccttcatatattacaaatccagaagtaactgctgtacagaacaccaaaaacccaatttagagaaaggctgctggtctggatagacattttgcaaaaagtagaaattttggtaaataagcatataaaaattttcaatgttattaatcaagacaatacaaatcaaaaccactctgggtgacataattgcaaccacaaaacaacagcagcaataaatgctgacaaggatgtggagaaaggaacatgcatttatgttattggtaagaatgaaaattggtagagcctttatggaaaacagtatggctattcctcaaaaaatagagagatcatatgacctagttacctactgctgtgaagtcagcctgaaataagatcttgtatagatatttgcatagatatttatagatattttgtatatttattgtatatattgtatagatgttttgatatttattggctttgcactagtcaagatgcaaaatcaactatgttgtctttcaaaggatttatggataattaaaatatggcatgggtgcacaatgagatactattcacccttaagaaaaatgactattgctcctcgtagcaacatggatgaaacaaaaaaatatgacaagtaataagcaagacacagaaagacaaacaccacatatttttaatcgcatgttgaaaccaaaacaattaacattaaagatgtagagttgtataaatatcgctaagagaaaagggagaggggaagagaaatataaaggtaaatgatggctgctgaaatacagttgaagaggactaaagagttctaatgtacaatatcctgcttgaatgtttatagtacacaactttctgtatattttatgaagaactaggagagaggcgttagatattttcaaacatatatacatgtatacacacatatcatatgcattttcggttcataacattatatcccataaatataaacatttattcactgctggtgagattgcaaactggtgaaactactacagaaatcagtgtagaggttcttaaaaacacaaaagtatatctgccatataatccatctattcccttcctgcgcatgtactcaaagaactctatatcctactacagaggtgcattcatgtttaatggtactttttcacaataggaaataaaaacaacctagatgtgtgtcaactgataatggataatgaaaatatggtatgtatacaaaatggaattgtatttatttgtaaagaaaaaattcaactgaaatttgcaggtaaatggatagagctggagatactgattccaaatgaggtagctcagacccagaaagacaaaagctgcatgttctctcataggaggataatacgtttgaatctttagatgtgtgaatctaaagatgtgagtcttttgagcacctggagaagccaggaaacaagataggacatgaatttcaacagaaatggacagtagaacacaaatggtatagtgtgaaaggggaagaatttggaagtaaggattaagtagaatgggagatggaagaggaaggtacaggataggtacattaaaggataacataaaagaacttttaaaaatgtgaaagcttactagtggagaaaacagagggaaaatgcctctctcagaagctgtaagatatcaaacaagatcccagtgccagctcgggttacctccctttgaatagttagtctgtgtgtcctataaccccctttcccaaaaccaatattggctactgccattgctttgtacttgacagttttgtactttgtactttggactttggacttgacaattaagaagcaagttctaaagataccacacagttaattcacatgaagagatcaagatggtataatactatcatggaaacttgacatctattggctagtgtttcatggcaccagaaggtgctattaaagttgtgcagggagtaatcaacagctttacccagctttggaacttccccacattaagaaccagtctgacaagatattcccatttgtgcagaaagattttgacaataacaaattgctatctgattgggtttaaagcctgctccatgagaaagaatttgtatctggtactggtaacctatagctaagaagacaaaggccctaggagggaacctactgctattctgctaaaaggacatagcattcaactgtccaatagctaattatatttataaccttggattcgttaccctcttagcactcatcagacaagcttctctttgtaatagatggtgattaatagagggattcataactaagaaaatacaaataataagggactatgagattctcagctctaaatgagacctatacatcacagtccttaaccccccaagactctgaaatcatcgtagaaggggagtcgggaccaatataagagccatgggtttagagggctgctgcaaagcagtgttttccagacatgacattgctgatgcacacaagcatttacagcagctcagagtgtatgctgaagacctgtacaagatgaagcaagacaaaattctagcatggatgggaaagggctcacaatgtctctttcctagctgaggagctaatggagactgatggttctggagagtcagttttcctaagatgaggctccaggaggctccccatgttgcagtgtatggaccaacatgcaggtacatattgtcagcaattagtatactcactgagttataaaaagcatgcttgaagttgggaggggaatgtgttatggaatgtacagaggtacagttgaaggggagagagtgtggctttgatcagaacataaactaatgtatgaaattctcaataaaaatttttcaaaaataaaatcaaatgacataagtaatgactattacataaagtccttatgcatttaaaataaaaattggaagaagatacacaaatgacatggcctaatgttcggaataattataaacatatttcattttactctatgcttcctccattggttgtttttaattattatttgtgtctaataaattttaaatgtttgtttttggacaaaagatattaactcacatctcaccaaagaaaacatgcagatcaaaaacaagcatttgaaaagatgttaaatatcacgtttccccagaattaaatagcaaactaacaagataccactatgtatgtggtaaaatagccacaatcctaaacaatctcttggagatatggggtaatatggatatcattcaaagttgatgaaaattaaaaatgacacagccactcttgtaaaacagtttgttggtttcttccaaagctgatccagaaatctcagattccttggtattttcccaggtgaacttaaaatatgtgtccacataaaattctgtatatggttgttttgggcagctttatccctaactgccataatgcaggagacaccaagatgcccttctacaagcaaacaggaaaataaattggaatatccaaacaatagaatatcattcgaccataagagaaattaatctctgagacatggaaggatatgaatataacttcagtgcatattacaaagtgaacaaagccagtctgaaaagactccagaagtatgagggtactcattggatccctgggaaaggaaaacgtggatcatagtaaaagaatgagcactggtcagagtctggggtgaggataagctgacagaacacagtgggtctgtaagacagtggaagtactcagtgtgacactgtcatgatgaaacatactatacatttgccgaaatcaacagaatgtatcacatgaagagagaatagataataaggatgtctcaatattagttcagacattgtcaaaaaattgccacactactgcaagatgttatttttttctcaaaaaatagatgatcaactttgagtttttaattatcatcttttatttttttgaggttataatataatcatattatatcctcattccctttcctccctccaaacacccttccttgctctcttttaaatttatggccattttcattaatgttgttaaatgcaaacatatctatttatacagatacatatatattcctaaatacataactataacctgctcagtctgtatattgttacacatgtgtatgttttaagggccgaccctttggtattggataaccagttggtgtgctcttctccagggaagactatttctcctgctctcaacattctttagttacctatcatcggtagtgtgggactggggcctcttctgctttcctctctccatggaaggctgtttattgttgttgtcctcattcagttcatgtttaggcaggcatgttggtgagactttatagatgtagtttctgatgttacgaagagacaaaaaatctcacagcaaaccctctgcttctctggacctttcaatccttccatcctgagtcttctgaaatagtcccagagcctcgggtgcaagagtggtgttgtagatatatcagttgagattgacttccacaactctgcactttggttgattgtggttttctgtaatggtctttgtctgttgcaaatacacattttcttgatgagaggtaagaactacattaatttgtgggtatagggacaaaaatttagaaagtaattagcagtgttctttctcatctaaggctcttagttccaaaacttcagaagtgaatatacaacctggaataattgcagaaatgaagaaaataaaacaggactattgtgtgagggaagggcagcaacggagaggagaataccacacaacaagtgatctgaagggaagggaaaagataaatccaaaagaagaaggaaggaggatagaataataatgattctgaaaacttatgaggaatcacactattactatctacattaaaatatctatagtacactaaattactggaaaaatacagatacatagtttaaataaattctctcatctagactagcaatgttacctctaagagctatagaccatctgacaaaaaccccaatactaggcacaagaaaccctttgagttgtcagtcaggctttcctaagagatgcacagagcatcatacaatgcttttcctcttggttgtctccagaagagaaagataagtccctattgctgaagacatttcagacacagagttcagagacctcagagctggaactagcttaagtatttcctccctgaggactagcatttattgtaccaaacagtgctgtggaagcttccaaatgatggtagcaaccaactgtcttacccagctataatgcctatgatccacaacatgaccagcatgacagcataaccctaaggcttcagtagtgatacacataccttggcggtaaccaatagctctctaattggacttaagacccactcaacaagaaggtcaacatgcctggtcctggtaatctacccaactactcagagctcaggaaatcatggctcttttaggagaatttgcaagatgttagtaataatggacactcaggaaagtaggggtggagcaggggtgcatgggaatttaatactttctgctcagttgtgtgtgtgtgcaaacttaatggttcttgaaatgtgtttattaaaatgcttgttcaaacataacccttaaaaccatcatatcaataaactatagttttatattttgtttcatgtgcttctatatctggttaggggggcttcctttttgtttgtaaatcttataattttttacatatattagaaagaaaatttatataagaaagataatatttagaatttatatatgaagataacttgtgtacatcttgaaatatttctcttaaagtgtgtctatttaaacagataactgattatttctgattttttacaattttcatcatcttcaaaactgcttaagctttgacctatgttgaaatacttgatgtattgcagtgggtggccagctttgctaaatctatatttatgggatacataatgaatgaaaatctcatcagtaaatgtacaaaattctacttttaaaactgttttcataggcaaacctgtccttttgcagttagctttttctcagtcactggtaactgcaactcccacatttttctctaaaggatctttgaccagatagtgaattagcctgctcatcaccatccacaggatcaaaccctgcttgccttttcctcgggcacactaatgtttccatttactgtccttttgttattgcaagttctctacacctttagggggagagatgtatttcttttctgagcgttttttgagagctagtgggaaaatgtgctattccactagagaggcaaacttccaaggcaaaaaagaccaagttacaagtagtcagtgtactaaagttgtacaggcttcaacattttaaatgaaacatggacttgctggggaaggaatagtggtatagacagattatctgtgggagaaaaaaataggatatattctaataaactacccttggtttcttagctaaaggaaagatgcaaaataagggagtgttgcatctcctagtgccaattcattcatgatctactttaataaaaaataaaatagaatacactagaataattgttctaatgactaatgaatacagtttgttatgtttaatttcaagctcggtgggcttgaagttgaaatgttgacttgaagatctacagttagcttctcacagaagtctgtcctcatgtctgtcccatcagattctctagttccaaggcagattcctggtgctgcctggttggttgctcaccctgtttctgccaccaacactgcgccctctgctggaaattggtaatacaaaatgttaacaaaatggaccccttgacaggtttgttgccagcaccactctactccatttccagatattctaccagtatcttcacaagcaaaagtgtcacatataaacactttaagaaaatttctacagttcattttcaacttaccctccaagtttaaaagcatgaaatagccacataacccttctctgtataaatgcctgcatatatggaaaaatgtgacatgagcaattcttttccaagctgcatgtgactcatagcatacaaaaattaggccctttaggaaacaatttcaacccaggcaacaatggcacacgcctttaatcccaacactcaggaggcaaagaaaggctgatttctgtaaatttgaggccagcctggtctacagagcaagttacatgacagcaaaggctacacagagaaaccctgtcttgaaaagccaaaaacaaaagaaagaaaagaaaacaaacatacaacttcatccctgtgtctggtacattgactttggcaaacttttcatcacttggaaaagaaaaagaagaaaggttcgcccacactattgtgcatctgacaattcaatggtagtgggaaaaactgattcattcacattattgtacatctaccaattcacagatataggaattgggtggcttggtttttgttttattttgttttgttttgtttttcctttttaacattgctgtacattacaccaactttactaagcataagttctagaagaattcataaataaacaatatgagttcactaaaataaattttaaaataattgtagaggaggtttaatttttggttgtgctactttgcagggaataaaagcaaaactcgttctgtgtcttttgttgaagggctgaaactatcattctgtgtttctggtttcctacctgcattgtatgcactaaattattccaagcagaatagcctgttgctctcttccccagatagaccactgtggttaaaagataagaacttggtagtttaaaggtgtcattgtgaggacacagtagggacttgattgccaaaaagacaaagaaacaaatgaaaatgtaggtaccactcctccggggaccaggcagttgattctagtcctaagggatatgttgtctcttgcaaagccaatacacacagcaagcttgccctccctgcctctctctgattccccacttctcttcttcctttggttctctccatctctcagccccagccctgtttctcctcattcttcatagaatagcaaagctgaaacatgcccaactaaatatacactacacagtaactatgttgacagtgggtcacatccatgcctctctcaatcctttttaaccccttgttttccttccctttctgttattttattgtaacttttcatctctcctgtgtttgttattttatttttcagtttttgtttggtttgtcttgtttaatttttgttgttgttgttgttctgggtccttcttttgaggactggtcattaatttaacagaatttacattctaatcaaactttttcaacacatttttatatgaactgactgaggttgtaagtgccccactggaaagctgaaaagcagcacactgatcttttgcctttactctcagcacctttccggagaggaagacgagctcctccaaaattgatcaagatggatgtagtaccttgttcttactctcatggtgcatgctgaacttatatctttgcattctctggacagatacttcaggcttccttatctaaaggaactgtgtctcccttggatgctgcaatccagaaaaccatgttttcattaacacaaacatctcctggtccctgccagtgaatttcaaattttcaaattacatatgtgtatcatctatctaaaagctgtcaggccccacacaggtggggaagtctcaccacgtgtgtgcgtttttcctacagaagacctggtgatcacaatgtgtttcttcacctggcttcatttagctttccattctctatcccaaggaaagaaatgtgacttaaagtcacaagaatggagttttgcaacattgtgaaatctcaaagaaaaatggattcccattggcctgatgaacaacagtaaaagtcaaaaaaaaaatttttttgctgagaattggtctgatttgggtagtcatgtagaaaaaaggagaatactagtattttatgagatataaccccatgcgactatcagttttgatgtccaatgagatgtgtaaacattgtcaaatcttagtagaaaattccagttcaaattgcatgtatgcacctgtcttttaacattttttttttcaaattcaaatcttcaaaattgccctcatctctcctttcattcttcttcctgatttttccccttaactgagccaatccccattgctgtggagcttgtccaaaggttcctaggctggaaacttgtttagaagtgctagaactttgagaggtggtaaggcctttaagagattaataaaccatgagggacccaccttcagattggccgagcgtagttcttggttggccgtgtttgttcctgaaggaatgcattgtgaaagaatccactctgctcctgcctccttgtttgttctgcacacttccatctcctcctcttctccttcatgttacaatacagctagatggtggcaccattgaactttgcaaacataaaaattaagatcttccagagtcccagagaaaccctgtcttgaacaccgccccaaaaaaattaacaaataaaccacttttctttgtagattacctagcacaggatattcaaatatgccaacacaagatctaatcagacaactatcataaaaagtagaatttatatcattcagggatattttatattgtatatattatatctgtaattttaataaattgtttaataataaataagtgatacacagagtaaaaggacaacccacatacgtattatcagacatggagtttaaagtaattctatgttcacatgttaaagataacagaaaattgaaagattacaccagataactggaatgtatataggagggccaaatgaaaattctgagacaaaaaacataaaatactgcagtaactaaaataaaacaacttaatagatgatacatctatcaacaaaatgtaaggaagaaatattagttagatggaagttacctaacaaatgtcttaatggagcctgggaaggcaaacaaatataaattacaccaaagtgtgaaaggtatgtgtacgtgatgaaaagttctagcatgcatgaaataccatgtccatcttgaaagtaaagagaatggagcaagggctatgtgaaagaatgtgtatcaattccaattgatacaaagatttaagccatagttctaagcagtgacccatactccagctagtgaaaagaaaattacacccaggatggagagatggatgaccttttaagagcacatattgctctttaagaggacctgagtttggttacagcacccatatcagacagctcacaaccacctgtaactccaacttcaaaggaaatgacaccctctttggcctccacaagcacctgaacttgtgtgtgaaacacacacacacacacacacacacacacacacacaaacaaacacacacacccttaaaatataaaagtaaaacttttttaaattctcttattaaaaaaataaaggatgaagacatgacagtaaaacagctgagaaacaatggtttttaaaaagtcacaaatggtccataaaggcagatacattgtcttcaagaggacaatcttccagtgacagctgactcttagtcagaatgatataaaagagaagacaatagaatcttaaaaataaaatattaaaaataaagtcaccagaaaaaaaatatttttacggtaaagcagtgcaggccttcctatagcatcagagtccagggacatttcacagcagcaatcttctaacagcaccacaaaaatacaccacaaggaaacacaaaaattgtagggaaactagaaaatctaaacttgagggtaatccaaaggaatgtggatgatataaaatgattgaaattttaatttaaataaaaattttaaaaaataataataaaatgatggcaatactcttttcaagagtttcaaatatatgtagggttaaaatgaatgataatggtcctaatggaattgagcaggtcagggctaaatttaacagagttgaatgctcccagtcctggttggaaagtacatactcgctagtacttattagtattaataaacctcagataagtgattttcttctctagggagtatatggaccttccattgctgtcctaatcctatgagtaaaacaagctaatgaaggaatgatttaccttggctcagagtttcagaggcctcagtgtactatgacaggtgggtgtaggaaaccgaagcagctcatggtatggcaactcaaaagcagagagaaaggactgttgatgaaataggttctctctccatttctttttctttcatctaggccctcagcctatacattgatgttgtctactgtcagagtagttcttccgcaatgggttaatcatgcctgggcatgtcctcatagacacactgagagatgtacactaccaatctatttggtgcatctcaaaccattaaattgatattcaagattaaccatcacagggttttactaatagaacaatgaaaagaaatctaatcaatatatgaacagaaagggaaataaaatatttcaaaattactaattcaaacaggaaaggaaggaggtgggaagggaactaaagtaattgggggaaagcaaattgaaagtgaatcatgtagtaaacataaaattgagtagcatgcttttcattcactaaatgcatagaagtagttgaggagtatgacagacacatttaaaagttgaatgtttgccaatttatgaaactggttttccaaagcaaacagttgattgcaacatgaaattctcttggcccgactggtcccgctgcccttctctgccccaaagaaacacaccggactctatattaattataaagctgttgccctttggctatggcttctatttgactagctctgccttaaatattaacccattttctaataatctaagtatttccacgtgttcttaatttaccagagaaaaagttcaggcctcttactccattgaggtctacatctcatctgcccagcatctctgcagagaagagaagagcaagagagtgatttcctgtttgtttttgcttatatactgttactgcccagctatgtcacatcctggtatcacatgacaattcctttctgcctacatttctcagaatcctcctcatatcctagtccacctatcttgctgtcctattggccaacagtgttttattgatcaaccaataagacaaacatatacgtagaagaacattctccatcatcttttcttttctgtctaaataaaaaggagggttttaactttaacatagtaaatctatatatagcaatacagttatcaagaactatatttacaatatttagtccattaagacgtagcaaaatttatagaaaatattctgtcatctatcctatctttgtgagtctaaagtcttatatataacttatctttaatcctaattaaggaaaactattatcataactgtccgtcttcaactccatcaaagaccacagaaggacaatatataaattctagaattgacagagacatcttgcttcctggacagtcatccaaagttcctctgtaacattggagcatccatcttcagcccataggccacagtgtgtccggcagacttctcagtgtagcaggaaattttaaattgtccgcatacattggcagttttttagtcattttcctctgtttcctgcagaatgtctggcagactcttcatgaagcaggaaccctttaggactttaccatcaaattcagcagtcactttcctgtgggtccttcatgtccagtttatcaaacagtccatgcaagagcattttcttgcccaaatggctaatcttgccattttgaaagcaaactccatattgacaaactccatgcccatcctcctttctggcataattggtgtgccaggagcagttgtgtctcactatcatgaaaagccctaaaccattttaaatgccatattctgtagggctttgaaaggtttgaagaacatctatccatcaaatatgtctctatgtatctagaaaacctagctaacctaactataaattctgactattataagtggctatatacaatctgtatttaattatgcattgcattttaaaagatctgtataaacacaatacctaaacaagaggagaaatatacatgttacaaaattgaccttaaagttatatccataaatgaaaatccataccaatgcaaagtactcatttctatatcatttcccctttttctcctttaaaaagagattgactgtgatcattaccatttataaccaacccagtatgaatgaaaacaaacatttataaacaatatttggcaatgtgggcatcgttctaaactacttcctgctgttagggggcactgtcttggggatgctaagacccagaaatcctgggtggtcagcaaggctgccttgtcacagctgttttgaatagatcacctgggccgttgctttcaggaggtcttgcttcatcaaacaatattagtctggaaggaatctacagcttttccttttctgtggaaacacaaataacatctcttttccaaagtaacatgtccttatacttaaatttagaagtcaaagcattttcaaaatatttaaattgaattaatccagcagcatttataatcaagtatattttagcagttgttgctctttccttagcaattgaacaattcaaagacaagacaatagcatacagtatccagactctctgtgtattttccatctttaagtggcttatttatttattcattattattctatttcttttagttttattttttcctttcatgagacagggtttttctgtttacttttgcctgcactgaaatttagtctgtagaccaggctggcctagaaatgactaagatctgcttgcctctgcctcccaagtgctaggattaaaggtgtgtgctaccatatcccagctactcttttttttttaaactttctctgtactttttcttttctctaccaagtctacatatatttttaaacacactgtaaacctttacgaggtttttcttcatctgaatctgtctttactgtaaatctctatcttcctgtaaccacatatgagtctatctgtggctaacagctgaggttttggtcgcttttggaaatgagggagctgctcttaaaggatgtgtgtcttggtgtgcctctcaatgcctgggaaacagagttcacccaagaaaatgctgctatcaagaagctatgcttgtctctgttcttctgtttctaaaatccctttttaagtttttgtcaagttttaagtggaaatttgtgccccaagtctgggtccattttgttacatgattcctcccagatcccatcgccacttcagcccccaaaataacacacggagactctattagttacaatactgttggccaatgtctaaggcttctattggctaactctgtcttaagtattaacccataactactatttctcaaggtcttatcttatcgagaacaccaaactcatgcatcctctctcctcccgggatcacatggtgactcctctttactatataatctagcaaataagaaaccttagtaaaaggccaacagtacttataactaatatagcatcttcatgtttcattggggctgagaagggaggcaggcactagcctggccaaagaaacctcaagttacaaaatggcataaataatatagtgtttgtgttcatttgggcctgacacagctttgggaccaggctagcaggaagaacacatgttacagttgattataaagttttgagcactgtgtcattatgtctttttggatttattagccttaacttgctctcggtcaatccctcacccccaacactccatcaccaccaccacacatgtgtatacacattgcaaacactgacttagtcgactcagtccattgtaataataaatcacaaacaggatggtttaaactacaaatttttttctcacagtttcgaaaactgagaagttgaagttaaatcactggccagactgagtctgatgaaggccttcttgtgagcttacagtcagctgccttcgtgctgtgtttccacctgagaaagaggaaatagatagaggagctttaacctcatgacctcatccaattcaaataaccacctaaagccttctggtcttaatctctcggtagccagtgagcactagaaagttgatgtaagaatgtaacatgaatacaagtacatggtacataataggttaagtaaccagctaaaagctatattgctaattagatgtgagatttaaaaaaaaattgtttgctctttttacttttcatttcactccagaacaaatgcacttaactgttactacacatgtcagttgctttgaaaagcacaacttttgttccacatggttttgaatgtagccatgtgacagggaggcatcttagcaaatgtgtgaaacaatctttaaaatagcatttcttgtatcccttaattctagtccaagttaggttctcctttcactacattttactaagcatatactaagtatcggactttatacaggcaagggtaaaataatattaagtcattccttgtattgtaaaattaaaattagttaaatttatttatctccttgatgtgaaaacacataatctaaaactctgcttggacttcagagaaagaaaacatatgctctgacaaagactcacaaacaagtgctctttgactagaaacatgatgggagaagttgcccctaatggcgtgacatttatgccaactgaaatttagaactagagtgaccctcttgtgtgttacccagactaaaatacatctgaaagagataggggcacttaaaataattatataggatttcaatccaatccctagtttatattctgagccaagataaagggcatggattattcttttaatgattaaaaaaaactacactggacttagactcttgaaagttcatttcaaatagctgggaaattgatggactagaagcaagactggaggtggccagataaaaactgagagtattctccccatgcaggcaagagagggttacgagcttggcttgatgaggcacggaagaaaaagaaaaacaaataactcaagataaatcttgaaggatatcagccacaatgaagttatataaaatattacatttgtatttcaattcatattttaccaagcatacaaaagttttttgaggttttgccaagcaacctgagaaatcacttaggagcgtcactgctggggctataaataaaggataaagtcatagcggaaaaattatctcagttatcactcccttttcctctaccaacaccagttttgatagtttctatcagtttgtacatttgtattgatttgtttatgaaggctgttagtctttttgctgttggctacactgcaaatatttcccccagtctatttatttgtttgggaatcttccaccatccaaaatgtttactttttaacttgtctcctccccgtccccaccaacttgctccctgtagtcatcaggagacatcagaggtcccacctgcaaaatgcttcccgaatcatgctcaccctcttacccctccccctcatttttactggtgcaagcttaattccgtgtgacactatctctgatatgaaatatttatgacaaatttattctctaacttctgtgatgaacccacttgggttgttattgtttgatacatttttcacgctctccttctatttcccaagtcaagattcactgtcctgcatttactatcatttagtgagtagaccctgcaaactttgtactgtgcagggaccaggctcaaatgtttgtttctttattgacttgtatattttaaccatctcctttttgccaagcaaaattctaaactctctctgtttagcaataacataaataaaatcaaagcaggtcccatactctcttggaatttacatttttagtttttaataccttagcttgaactctggatccagcattttcaggtttgtgctctttgacagtccactcagctacctaagcctctgtcactttttaaggaggtggtgtgggagatataacacagaacagtcaagctctagagagggacaggaattagatgattcatccaataaagcaaatattagcatttcttctctcttctttttttcacctacatattatttttctttccctggatcttgtcttcctcatttctacccttgtacattggaattaatttgtgttgtatttagcccatgctgccttctcttgtttatcgtaatgcacaaattacatggttttatatttgttttatattttcactttcaatacttgtcaactatgtatcctaactttaaaaggaagaaaaactgaaaatgctaacagattataaagattctgtgaatgaaatgaaaattaacaatgaatataaaagtaagtaaatttacttttctagttatgtaagcaatctcaacccttatagtttcttcctcaactttgagagtttaaaaagcaaggaattcctgtctccatttgcaatcaacatccactgagtagaaatctctctgtcttccaacaattgtgcaggacctatgatgccccaggaacacccatagactccaggaatcctagactcctgtacccttagggtttaccttcttaggtaggaagcctagcatcactcagatgcatctgctagggcagtgaaagtctggagccccaaaggatctttagaggtatcccatataacatccaaccgagaacagaaatgtatgcctaagcatcttcaacaaaacttgtattaatccctttatttaatgcctttatcaacataaacctcagtacttttttccatattcaatagactcaagtgtgaaattttcttttttactggccttataatatttaaaggcgcgcatgtgtgggtttatgtgtgtgtgtgtgtgtgtgtgtgtgtgtgtgtgtgtgtgtgtgtgtgtgtcaaatataatgactcatgactttctctttttcttcaagcattttagggttgccatcatcctaaacatcatctttaccctaactggctagcttatattaaagctttgtttcctttaggacatatcccatcattaatactccgaggccttacctgaggagtgccaacattatagacagcagacacacaggcagccctaagtgaaattgtatttatcttgagattgaataagtattgtttgactaattatcattgaaattaatcaaaattgatccaccaacaaaacatcctcaaggcccagaatcaaaagcagagtacaaagcctataattacccagctccataatcattctgacaaaattactcacacatatatggataagaatattttatgactatactattgtcataccatttgaaatatgaactttgttataagatgtgttataaattcctcccattgtatgtaagtattgtgtaagctcttagaaaatgtttgcttccttaattagaattttgattatttgttttttattgccaaatgggtcctattcagttgaaacaaatgtaagttgtaaaacattgacaaagtctattataaaaattttagcagggccccaaatgtcctagatcaccagactatagccaaagttcagtgcttatgttactataaaaaagaaaataaatatttctgcatcaccatatgtatagagttagaaaattgaaataagtctttatttataactaacttggttttgatccagagctgcagggtcttcacaacacaggacaacaacaggatatccaagaagaatcgtagtgaggacccagcatcgatagtgtagtagaaaccagaggcctcgaaccagaccaatgactctttgcaatgaacacttgcaagtaaagacatttggacaaaggggttcactgcgtgacacactgtgtcacactgcagcttccatgatgagatttttaatttttccccttttagtttttctttccttttttttttctcttaaaggttgtttttttttagggggaaagtgcagggactgaggacagatgagaaggggtggtgaaattaattctatcaagatacatgatgtaaaagacacataagtaaaaagaaattttaaaatgactggagaaaatcaagaaatttatctttattttaaagataaatgtgtattggattaacgaaacaaaaagcacataaaaatgggcacagaggagttcattccatccatgtgtttattgtctttttcaaaggctacagaagatatttcatcgacaaaaatatattttaggattcaataattaattagaaacttaatacataaaagctaattttttggattttaaaatccctctttaatgggaaatagaaataggaaataataacaatagcaattacaatgtttacaaagggtttgaaattttcaatattcctatgactctgcttgaagctcataaaattaaaatgatacagtcacaatttgtttcttaactattttatatgcagtaatttttaatgaagcaactaaattaggcataacttactgcagctttaatgtagttatgatgaatatattttacttgattaaaactgataaaaccagggagccttaaatattatcttaaaagattaactactgtgtcaattaaaaatctaggagaaaggtgtttgtgaggaatagctatcctgaataataccttccttttgttcgtttcatttaattaatgactcaatcaacttttcctgtttccacaaaatgttcctaaattacacatgggcttgcaaatggaaaggcacacagaagtgtattagctgaacactggtgaagagtcaagaagtgattcatttcttattggaggggcaggtagttgacagtgtatacagaggactgaacaccagccattctacaacatattttgtattacagaaagtagaatgaataaatactggcaaaaaaaaaatcaagttgttcccaatgggtgtgctattgagtcccgtttctatgctttctaactgaacaatcaagcaaacttttgcacttccagtcttgctatgaccgattaagcaaattattaaagcagtccctaactacacagaagaaaattatgatgccatgcatcgatacaatgtgtttgcttcatcgacaaagaaggaaactatgcaaagaaacacttttggtaagtgtgattcatttttttttcagactgcaagtaaactgtcataggtgacaaattttatctaaggaatgcaagtagcacgacgattgttttagtgtcaagctcccctaaatgggtgtctctgaagagcaaccagccacgtgtcttgctctttaaaccttcaccaactgaatagaatccacactgtcttgccttctattctagtctagcctctttgccaagtgacctatcactgaggtgaccgaaaagccaaatgagcctgtccttaagtcctgcaaccaggggtcagaggatttccaaatgctgaagaagtccatgtccttgacaaaggaacctgaaactaaggagaagggtggggtggggggagagtgaagtagtaaaggagagagaagggagggaaaggagggaaggaaggaccagagactagccaattagagtgaagagaggggaacattggaacagtctctaaaagaagctgcctggagctagaggggtgtggttttgtagtctacctctaaaggctgaagcgtcctgccacagtaaagccctgccagaggagcggacgttatgggactcttcaaagcgcttctgtaaatacgaaactctccaagggctgtgtgagagagggactgtgtgagagagggctgtgtgcagcccggcgggtcccgtgggctcctgcttccaaagaactacccagtgtccctttctaactactggagtcagaagtgcacgtccctcacagatctgcctcactcccaggcacgctacactcggcccagatccgaccccagataggaccatctctaattcccagtctgagtccccgcagcctaggacaccggagtccgcggccccgccccctgtcctcaagcgcgtcccctcccccgccttcccagcctttccacgcgctgcggggcgctgattggccgtggcgctgacaggaggcggggccaggaagtacggccaaacccgccctcgcgtataagcctcttctgcgctcgctctctccacctctctcctctttctctctcgctcccttcctctctgcaactgaacagtgaaaattcacattgtggatccgctaacaggcacagatgtcatgtgaaaacgcacatgctctgccatccacaccgcatttctttcttttctgtttccttttttccccccttgatcgttctccctcttctttgtaactaacaaaaccaccaccaactcctcctcctgcggctgcccttctcctcctcctcagtccaagtgatcacaaaagaaatctccgagcccgaggcggtggcattttttttttaagcaagcacattggagagaaagaaaaaagaaacaaacaaacaaacaaaagcaaaacaaaacccaggcaccagccagccaggacatttttttccaccctgcctgaaaacaaacaaacagccatcaaaaacagtcatcagcaacaacagtcatcaaaactgttagcttagcggcggcggccaccgtcacgctgtggccacgacgtctgcctgaagggatgcttctctcggcggagcagctcttctcagaccgccgtcttccctcgtgctgagcgggatttttgggttctctggggttcgggctgggagcttcatgactacgcggagcaggacagcggccacaccatgcgaggtaagcgagcccacgggcacccagggtccccgaggccagccaactccagccagacccggagctggggaggggggaggggagcgctctcggcccaagggaagagaggtttgctgtgagcagctcccctagttcggttcgcaggtgggactgcaaatggcctgggcttggaaagttgtgggaatgtgtggaaggctcgggacttcggcaggacgcgggagggcgctttttggagaccgggacagcgatagtcgcttctctcagttctggacttgctctcatcttttctgcgcgtcactctcgggtgcgccacaggacacgggatagaggagaacaggaagcaggatgactgggtagaggcagctggaagcccgggtcacgttgtagtcgctggccggaggtgaacactgggccaaactgccagactcaggagcatcccagtctacaagcgcgtaccttctcaggaatagtaaacatgggatgctcccggaaactggacgcaaaagcctatggcaggaccttcccgggttccccttttccctttgctcttcgctctggctgggtcccttcccaaaaaaagagttgctaggagaaagaaagttcaggagacttaaggctatgtctgagataaagaaccgtagtgggagctagtgctaagtgcaccttctgtccagggcccctgccaccagcagcggtgccacctcagggcaaacgatgctgcccaagtggcccgcggggatgacagagaggtgtcccctgcatagctgaataggtgggcttcaggagtcagtttgtagatctcctctcctgtggcacaagttgcttgcactctgtccgggactcctcctctctcgctttacagtgggacacaacttccctctcttcttaaagaagccactggatgccctcctgacttgggacatctgaacatgtcgggacactcagccccaacatccgagcgtcccttccttggtgcattgcgttcctatgggggcttttctctcggattcacaagtccctccagatcataaaaacagaaataggcgacagtcgagtctccgaacccttctgcctcctggatagaagtgctttcagcaggacacatttcgaatagggcccacaaataccaatcttcaaccaccctgcttcctgctcccatgcactaaccctactccctttaagggggagtgggcacgaccctcaccctgatcatcctcgaagaactctagtcctggcttgacctcaatggcatacagatgctggggccaccgccttggagcctgggctctgtaggacaaggcaggaggaaagcgatggaaaaaaagttgcccattacccatgggtataggactccagataagtgacaaaggtgtcttggtgagtgtcttgattgacactgaaagttaggatcacagtgtgtttgtgagcagtgacaagagctgattgtcccagtcacgggatggtcacatgctccactatccaaattctttcaagaaattgtactacaggaattggtggcgagagctcctttacttagtgagaaactgggtttttgtttatcgttttctgccccacctcaccatctcacactctttcctttcggtttccttcgctcccaattgaaactgccaactagggggttggctttttcttccgctccaacaatccccctcccccatggctaggttcaagctacctgagggtcagaaaccaagtgccactgcagttggtcccctgaactaatcctgtagccaagctacaaaccccttaagcctcagagaggcggagcagagcgcggcttccttgcgcttaccttgacctgctgcttctgctgctgctcccataggagacccctggcttgaaggatttaaggcaagggctagtccccagtgtgaaccgacagacacctttgtcttagagaagatcagggtgaccaagctgcccaggacagttcactaggtttaatccaagaagactcccctgaggcagcctgaagggaagttggtaaagaaaaagtctgggtctctctgatctcttactgtcccatcccaccttcggctgcttgctcattaaagatgaaataagaagccttttggaggtttaatgcccaatattccccctgggggtggagggagtgtagaatgagactatccagaagtcttctaatagttgaacttgagtgccaattaagactcgagacagaagaatcaaatcatctttcccttgcacaaggctgctaagcagaccattggaacagactctgctgggggaggagctgccgtgaaacttggctttgcccttcgcctgtgagcatgctatcgactccttacaccatgcttgcccccaccacacacactgtctcccttctcaaatggtcctttcagagctttgacttcaaggtttgcttctggcaatggcaactgtcctgagtcaggtcaatttgccagacacaaacagtgtctaggatggagcagtctccctgtgggtcaatcagcaacctacccccagatcagactacacagtagtgcctctgcttgggacatttgagagactatttctggggaagctgtagggaaagcggggtgttgaaaggctctgattcttgaggtcattgtcctgacccgcagcacaacctttctgaccatgtcccaagttccagccatgccctcctgtctcttaaacaggagaaggttgcagcttgatggccctcaaaactttgcaccctttgtctgtgggagggtatcctatgagttcagggatgttttccatgcttcttgaaaagaaacttctggaaagggggagaaccttaggaaggaaaggagggaggcagaacagtgtggtttttcaaggctccttgttgagtagtctgccgattgttcattacaaaggacacctaagtggtggcttttctttcctgcttctgcataaaatcccactttcccaagcaggagtacatctgccactgtgatcaatagatgattgcagcttgggggatttaactctggttttattcttgctgtaaataaggatggacttttacaaaaaaaaaaaatctagattctatcattaacaagcagtaaatttctgttgcctgctaaactttaaaaaaattagcttgctctctgagatgtggccaccgttgaaagtataaagggtctgaatattcttagaatttttcttaatcaaaattattgctctaaattgtctctacaagttccaattaaatgactgaagttaagtatttctaaccaatattccaccttccacattaagaaaaaaaagttaccaaaaggacattcaagacagtactctgttaatttctgcccactcagaaatcatgaacaaaatggctttctaacaagaaaatcaatcactcaacaatttaaagaaaagtcttaaagctctgtttcaagtactgtggaataatatatagccaaaaaaaccaaaataccaccccaaatggttataagttcacccacccacgttgctcctcccttgacagccatggtgaattgttaactattagaatacagaaatgttagacatcttgaagatgaaggaaagttaggcatcggtaaaatacatcagtgaacgtgaagatggaaattttgagtatcaggcttcataaacaggacctaaaaattataactcctttgtttgtgctcgcctaaaacttgtaaatccttttattttccattagtgacaataactttctgatcagtggagaaccctttacagtgctctcttctatcactgtcaaagtggttttgtgtgatagtttagcataaataactcatcatgttatgctcttaactaaatataaatattaatgttaatatttattcatcttggtactgtgccaaatgctaaattattaaaaacctcaaaaactacccataaatctatttgctcaggttattctttaaatttaagtgtttccaattcacaaaacataattttagaacaaaaaaagggggatcaaatcaccaagaaatgatagagaatttgtagttcatgttcatggtatccaaaccttgtaaaaaaaaaaaaatacttgtttttctaaaactaacatatgaaagtattgaatataggcggtttttctacatcaagtgacaaataaatgttttaagctttgacttctcattttataagcgtgtgttcaccttttaggaagataagacagactgtatcctagagtttttatatattttattgcaacagttctgaggaatgcaaatgtgactcacaacccactaattaatttacttacatccataaagtatctctaatttaaggtgcatgttgcagctttcaataaataaaaaggtttaaatcattctagtaggtaattcagcttcaaaactgtgtacatgaggctgctatgattataacaatttacaaggtataggtttaaattatgcacggtgacatcagtgccactgtgcattggcaaaatctgtgacttgcagtaaagcgtatcaagagataagaatagtaacattgaactgaagggttcaagttctatccaattgaaaacaaaggtagatgagtttgtacattgtaagcacaaaagtaactgaaataatattatcattctactaggattaacagagattcttagtgttgagccatccctatgaatacttcacaaaactagaaaaatcacagtttttaattatattggcatcaagttagttgatgctaatgaaatactattttgtgttaaaaatatataggaagtaaatattagagaagaaattgtgcttaaaatgaaatacgtctttctttcctagttctgctctccacccattcttatctaatgggtaaaaattaagctaataaaatgcctttaatgatgtaaagaattgtagcctttgataaagtgagcactctacataaaaagtattattcctgtaatgttgcaatcatcttccaattacagtttcttgcaaatatttaatctgactttgaatagaatctctgacttgacagaattgctagcagataatagcagtctttggaggcgtctgttgatacacactgataggcaatatgtatatgcatgtgcctataaccacccactcagacaaaaagaatgaatatttgagagtgaaaatcattcttatctttgctttcacaatccagactccaaactcaaacatatttacagaaacagaatggcttcccaaagcgttcagaaagaagatgtgaatatatgtggcacttgagccgcataaaaaggaactgctaatagcatctatttataaataatctacacaaaactccattttactgcctaatgataattagagggaaagggaatcaaagaactgaggattgccaaataaataaaatattccctctcaaattaagcaacaaattcatagataacaaggcttctgccatgaatttgaaggatgtctcctttgtagcataagacaaagggagcatagaggaataaatattgattgaactaatcatctgatgaatagaaatgagatttaccagtgcaccaatataatagactatgttaactagtcctttcatggcgcatatgctgccctttcaacccctgacctcttccattcagttcttaatgagggaaaccacaggtgttataacggtatttatggtgaatgtagctaaatataataacatgtggttaacaaatggcattgtgtgtggattcttataaaagaaaatactgtgttcacagcatcacgaaattataatgtacttcaaactacatcaaatttgggcttgctcaggtaacctttaagacatagttactacacagtcatcaatatttcaagtaccatatttagtgactctatgatccttgcaatttcattaatgcttatctgaggaggtaaaaggattattcaatatatatttgcccacatgattgtatagtttgcagcataaacatttaaaaataacacatagagggtgaagtattttataaacatggcatgcatttttcttggttagtgactgttttagaaatattgaatataaatatagccctataatattaacttcataaaacattttatttaaaattaaattatgatattcttggtataggcatgtggttaaaaagccaaaacacatcacctcttgccaaaactaagctggaaactgattcaggagtgtgctctggtttagtatgaaaagcagtttgctttgagttagatatgcccatctctgcatagtgaatatagcattagtcggctaagtatggtgactttgggaattactttattagaatgggtatatgtcaatgtcattttgtgtgtttggttatcacatttgtgatcttgggtcatatttctctaatttagacaaattattgactttcgcaaagaaagaacagtttatcctggttgtttacaaagtgatgctcttctcaatgagcctgcttattgttgaataatcatgtaagacaaatatcttgctatatggagcatgcatatgatctggggtgcctcaggaaatctactatactggttttacctcatataaaggtatctttcattatttatttcaaaaaaataaaatttgagttattttttttaaattttgtataaagtatataatcaatcatcctgctttaaaatgttgttatgtcattgcctaagcttctcgggctataccgtgagcacatcataacagcatagacactgtgctttaatactgagataaatgtacaataaacaatgctcccataattaggggcaaaatataggttcttaaataatttttctaacaaaatttttaaaatgttttcacatggaaatttatctctctctttacacctcctaaacacgattctctcatgttttgaagcctactaaacttactgatcatcatacttctaggagctcaagttaaaattaaactctcatgtatgagaaggagtttatttgctcacagttgtgtccattgctgctttaattttaaggggaaaagatcaaatttgtcatctataatatccatatcaataccaataaaaatggatgtgacttccacaaacaagaattatttattagccatctacccaagataaactacagaaatagataccgagaatactcaggttgatacagtggtcaatttgcttgatctaggccttgctctagggagcacagagacaaaatcaccaagaaaatagtgaggcaatcccttggtgctcaggtctcacaggtaattggtacaaacttggcctggaaagatgagaagaaaccctgcttttggttaatttgttgatcttaatgaggcctatagaaatactgtctggtatattcctcagttatcatttgtcgttggtaccagttgaaacttaggcttgttatgaaagaactattgagaaaataatgcaatcttgtgttaacaaaaaaaaaatactgttatctttgagtatctcgtgcaataaataaaaaaagaaaagaaaacaaagtatttgttagttataaaaaatgctgggaacaaatgtcagtataaggaaggttataatactttgttgttctttgttttaaaatttttatgcattttaactaaaatagaatcaaaacccctccactcttccctttgctcttttgtgcccctcccatctccttactactcatcccatgcccccaactctcaaattgaatgtctttttctttgattattattgttgcatacaaataattatacatacatttgtatatacctgtgttacttgttttttaagtatcactgagaaaagataagtgaaaatacggtgcacatatatttgtttttatattgaaattcttttttccaaataaggaaatagctgaatatattgaatttcattttctttaatgtttaagctattatctaaaggtagtgataccactctggggagtgtcttagattaccagatatcaagaagaataaatccacctccacaagagaaatttataggagagtagctgaaggcccccgtggtagtcttcacagtcaaggctcctcattttgaaatgacagtttgccagttcttatcttatgcattaggtccgtgagcttagttaagtgattgtgagtcctcatccccatgtttagtccactctgaaacagcagggagatcaagtttctgagcctatgaagctgcaaagcaggtcgggctggggaaaattcaccgcagtaaatgtcaccattctaaagctccaagcaggcaattgtccccactgttggccataaccccctgaattagcaaaaatcttgtttccaaattttttcgtggaaaacaacattgcggtcatacttcacagccctgagaaacagtatttagtttgatgctctttgttagctagaatttaccacactgaggaaattgggtcttctgttatagcaacatccagctacatgatgactatgggtggtccttgacctctttatttcttaatactaaaaaaaaaaaaaaaaaaatcaagaagtagttcaacaacccaactctatttcttgggacttctctaaaaagtgaaaagtttggaagtcactctactttttttaatagatttgaccaaatggttatttcattaagcaactgcttttctaaatacttactgcaatttctctctggtccacttatgtttaatagtagtgagcatatgctcacacttgaaataatttctggccaaagtcctgttctggggggtaaatatagagtgaaccttgaaaaagcaatgcattaatttgagctgttatttgtaacacaagtctagtttgtttctttatttgagcatttactttagcttgtaagaaaatatgcctagtactttaaactaattaatagcattaaactaatattctgatcttaagttagaaagactgcttaaaagggcaatcttattaaataggatcagagtgtgttgttctctgtaattaatgctcataacattagatcactgttttatttttatttgcctaaatagtatagtgaaactagttactttagaagcttccctgaaaacgttaaacagaacatgtctaaggaatgaattacaagagtacttcatatagtttaatagtacttcattagtatgaaattcaatagtagaaacttcccatttttattctgtaatttaagacagaatagatacccaaattgtaattttcactcagtaagagttgacttccagattccagaaagaaacaataacataagttgaaataataacacttagacatcatgacttcgtaatgaatgatttgctattattagggttgttgagtcaaataacaagattatttcacagcgcgttttctgttaacttgcacatacgttgtgcctggcatatgcagaagagttacacactttaaagaaaagaagaaaccttggtccaattcccacagttgttaaatatgagcaaatgctgcgcagtctggtagaacagaggaagatttgcttggaaaaacatgtcatgtctttaaggtatggtgctttctggaaatagtgcccttcctacaaaacaaaatattttaaatatagtacttggaagatttgagatctcaatatattaattaacttgttctcaaattaaattgaaaacaaacagtgtaatatactagacacccctttcaaagctgactacattttaaaataagattaactcttaccacattcattcctgcatataaattttcaatgtttgaaaacatgttagatgccaaagaaattggacttttaaataaaccgtctcaaggacaattcaaaaatatacctattaagagtattacgaagtttacataaatatccatcatggttttgtttcaatttacttactggtattactggagattaattctggctaatgctcaaatcagaataaatgtacatttatattattagctttagaacatgttacttcataaataaatagattctaagttatttccaccaataatttgttgtattcactttctccttaatgaattttaaagctgtctaacatggttcactcaagtgttggtttatcgtcagagacaaatcattttctcatttagaatgactaaaaagaaatggggggagctgaatgtggtacctcacattatgaattcaattacagaggacttaatatgtgtaagatacgaagccctccaagtaacagtctcaaatagaaaagaaagaaagagaaaggaggaagaggaagaagagggtggaggagggagaaaggagggaagaaagaagagcatgttcccttatgcaagctctgaagaatccattagatactatccacaagaatgtctcggttgtctgctgttgtttatgccactttttaaatacaaaaaaaatgaataatttgtctctggtaccttgatttaaaagttatctaaaattacattgaaacgaaggtttctgactccgaacttagttctatttttaataatctgctgtctaatcttatagggaattctgtttttcccatctctgcatgcatagaggacattgctaataaattatgcaaggcattaatcacttgctaactatggatgtaaactttgctgccatttggtgactatatcccttaaaatgaagttttcattaaaattctggccaatgttttgatcacatgaaagaaccacataataaaactgcctattcaattacagtgtacctttgggaaaacatagttctccgcagtttttactccctgagtaatcatgacattatttaccaatatgaggaagaattacactaagtattaaaaacaaccttcaggttctgactggccactgactggccaaaacaataatgaatcccaagtataaatggtatttttcttactataatttttccattggaaattttaaatatataatttcataaactcaactctgcctctctttatataattttcaagtttttagtgaaattgcacattctgtttccccattaagaatctatactgactacagggatataaactggggaaatacctctgaaactattggggactaatatgacattgctctccactcaattgctaacgtctctttcagtctgagataaatgtgcttattttccctgagcttgtccaattgtctgtttttaatgtctaccaggtagacaatgcattctcttcaggcataaagatttcaaacaaagcaatgggctgaagagcctggtgtaccactacttacccacctaagctgaaatcatctcatctggctgaccagtatcagcaccagtggttccttcctgtccttctatgctttctacaagatatttagtaaggaaagagccttagcaccattaggaaggtgccacatctaattgtgcccagcaatataaaggggaaaactaattacatttgacattaattctaaagaaatgcagagttccactcctccttaacaacactgcaatttaatttgttttgcatttgggctgaaacagaatgcaccttacatgaaactatcatttatgtgattaattttcacggtttcaaattaagtgcatttacttttctttagaggcatgattgttagcctgctgatattgattttttttaggcctcctcactgtaaactgtactatacaaagaatggtgtaaaatgctagcactacactgttatttatactttgggacagtaattgatcatattatataatgatgctgactcctgtagtcatcctaatttgcccacagatactattcaaaagaaaactgcacatactgggtcatcttcagctcatatttgctttctactttgtgtaatagtatcagattagaaaagactgaagacctacctcaggtgattcccttttttgctttatgtaaaatacccttcctgctagcactatttcagagatagtggcactcttcccccaaatcattaattctgtcactcttaatactgtggctgttattaaggaaagttctggaaacatttttaaaaggaacttactgtgtaaagctgagaagaactgacagatgcaacctcaaccctgtactaatgcaacagcaggaaaaacagtataataatatcttgcttgtttcttgctcaatagatcccagccagcttatgtggatgctatcttgacagtccacttagcaatcttgtgagatacgctagacaggtatgcaaaataataaatgtaggggagaagagtcaaaggaaactctcgaatgaaaacagaatgctgtataaaactgtttaagcttccaacttctgcatttcaaagtagtcttaaattttaaaagtgtaagcatctggtttatctttaaaaacatgagtattgagaacttgggaaagggactcagattcaagtattaaagaagtgaaataatggaagtgaccttttcatcaggtaggagggtttgagaattggtgtccctgtgtgctatggtggtggtagctcaattatactagcacaacccttgcagtgttgtggtctgtcttttcatctggttcaatgttatcccatgtgagctttccaccagtgatcttcatccactgattcagtggctcggtatcttcttctggctcctcttaaaaagtgataaactgaagaccttgacatttgtggaccctgttctgaaaagtcctgataattaagcaaagcatcacatgtgctggaatcttttctcaaagcccataagtggaaactttgataattcacctgtatatgtgaaaatgtgtgcatttatgcacaactgagtgagtccatgtgtgtatgaatgctcacgtgttgcgttattattatggcttttaaaaaaccatagcctttgctccagaaattcatcttcttgaaatctttctgaaggaaagcaaactaagggctaagaggaagtgatttcactagacatagctgtagccttactttgtgctctgcagtgattcagtgccctttgtgacacagcctttatttatgtgcatcccctgtgcacatatgtgcatttgtcatgtattccatacacctcgctggcattaagtatatatgtgtacctgatagtatgctgtagaaaatgggttgaaatggcaataaaaacagaattctctttgaccagaatgagcctaaacaccagtaagaaaaactgaagtgcagaagtttagatgctacaatatctaacttacataaaatgcttgaaacaaatagtaaaagccacatctaaaaaacatagattttatttgtattgttttcttctttattttcttttctgaattttcaggttttgcacatatattcagtatggaccatttcaaagtaagaaagtgaacactcgaggatagtagaaagacagtttacttctgtggttttagtttctactgtattttagtttacttgttagcctgaagaacctagtatgatgatagaattaagaatgaaagcctaattggcccttgaagaaattaactttatcattcattccctaacattttccaactatccctaacttagtgaagaattgtatgccagacactatactaaatgctgatatatattaagggaagaatcatctccatgtttccaagttcttcttcttcttcttcttcttcttcttcttcttcttcttcttcttcttcttcttcttcttcttcttcttcttcttcttcttcctcctctcctcctcctcctcctcctcctcctcctcctcctcctcctcctcctcctcctttcttcttcttcttcttcttcttcttcttcttcttcttcctcttcttgaaaaccatatgatttactggaaataatgaaactaggaggagtagggggtgacgaggaggaagaaggcacactaaaactttctccatcatttagcaaagcagaattctgccctgctaagctcttgttgagggtgaattagtacccccttttatgtctctgaaggttcatattaatttttgaaaacatattatatcaaatgcaggtgcaaagagtaggatactcacataaccagctttcctccaattatgtctgttgaactccctgtgatatcccagcaaaatagaaagtttttgcaatactggaagtgtggaaatgccaaccaacattgacaggcttgggtgtcacagtagaggaagacagaaaatgaaatgattcctacacatggcaacgtgaaaataatttaaatatttccgtgctctgtcatagttggggaatctcagtgcatccttaagcttgttgtgagctcattggcatttagtagttagagtcaaattcaatgatttttcacctccaaggtagttatcatacatggataataacagctctaggatagtggggtgtaattttgtggccaaggaactatattggaaattgggtgtaggctttgcccaaccaacagtaaatatgtggcaatgtctaaagattattgcaatggtgacaactgaggtggagttctgagcatctcataggtagagtccagaaataacaatgaacatcacagcacacaggaaagcccatagaaaaaagaatcatcctgtcgtacaatgggacagtcctgacataagacaacctaccccagtagtcttgaaagagtttctgaacagtgtggcttcccacatcatatttcctggaaaagctgcaacttttcctcctcctgtccctacacggtaacacttttgccactcctaagaaagcctgaactccactccttctaagaatttcaaagtgtgaagacttttgtactaacaggactggttattcaagtattgattccagtactgagataatgaatgtttttaacaaatgaacaagacattcttttacaagtcagatagattctatttctttgctttccacaaaattaaaaagaagctattagggttgtcagttacagatcattcaaaatagtttttggtgacagaatgctttatgagttgaaacatcaactttagaaggagctggaagatccaagaatgggagttagttcaattgctatgactaaattatattttgactaaattgtatttagtcataaatatatgactaaattaaatataaatatattttgttcaatatatttatataaattatatttttagcatgtatatctctaagaaacaatccaaacacagtgttgatgataaacccactatattctagtagtaatagtcaaaaacaagtatcagaaataaattgaagggaaagatcctgtctcttctaaaagattgatttcttttaaaaaatatttttgcatttagtaatgtaaaatttattacataatttgacatttttatcagttgtatctaatgcaaatgataactataaatttcaacccagaagaaattttgtcaaaaaatcagtattcacagtttacaatgaaagttttgacataaacatataattctgtggtataaaagtatgacttccaaaagaaaagtaaacactatgaaacttcagttaaaggatttaagtgttttctcttcaaatctatgatacaaatatcaaaatattgtgaaatctagattttattggtatatctaaagaatgattcatcaattatactttaaaatacaaaacctaaaattgtttggaaactacattctttgcactaatattataaaggccacaaaatttgctactgtggtcataccaggattaaaagaatgccctgggtcccaggactctaatcccatggtcatctgccatgttttctcctgtacttattagcctatatcataattcattaggcaacacctgggcaactattttgccctcagggtgataaaccattctcaaggcgatagctgctcctaatgtctaggcaccatcatatctacctttggacaataagcaacagttcatttttactcatatttttaaatcagctgtttctgtaaaattataatcaccagccttagaattgtcaaccacaggatagaagaacctccatactcaaagagtatgagccattgtattcctctagactacttcatgttttctgtaagtcccattagtaaatattttaaactcagagattcatgaaacttctgtggctctcatcacagcacacaacgtcagaactttgcgaagtggccatagaccaagtataatgacttatttattgtggctgtgttcctataaagcattatttgcaaaaataaagcgggctacaccttggtggacagttatttgctggccccaaaacttcattgttaaagcaccgaaaacaggatatatgtctaaattttttgttctcatatcctgactcaataaatatcgaataggtacaaaaatttaaaccttaagaagatattaaaaatatgctgaaataaaatgaatgattgaaaataagaaaataatcacaaacctaatatagattagacaatagaaagtgctgttggtcacaggcagtgaggtaaaattagcacacattattcatatactcttcctattatagtgggaaattaccaatacagagtcaggtagaagtacaagggtattacttacagagcaacctagccagcctgcgtggcagcggtctgtatgcaagcccaaaagtgaaaccgaaagacaaatgcagtcccctgaaagactcactctacttcaccctgaccacgccctcgcaagtgtggtcaggcacacctgtagccagcccctaagtaggtgtggctacagcttcctctacatcctatagtaaacaatcaattataattcaagaataacatttcacatatttttcttgattatattttgtatcatttggactagtcccaagactaaattcatacttatctataataggtaactgaaaccacattaattgtggtgtatggaagctagactaaatatcaggcaattaacaaaacaattatcaaatatttcatagatctgaaatactttaagttattggagaagatccaccgaagaacatatttttgtaaacaaatactatgctggacttcttacctgcagtgtgctgatgtaattcctagcaaatagccactatatttgtcatgtagcaagtgagagagatttaaaaaaatgtatctggctgggtagtggtggcgcatgcctttaatcccaacactcaggaggcagaggcaggtggatctctgtgagtttgagaccagcctgatctacagagagagtgccaggataggctcaaaagccacccagagaaaccctgtttcaaaaattaaaaaaaaaagaggtatctgttattcttctatctgatagatgaggaagctgagacaatgaagtcagagcacttgtcccaagccatacatcaagtaagtgcaagcctgatgttcaggtcctctacctctcatacatgtgaggtagtcttacccttcatcaaatacttttcttgataaatgagtctctgaggtttcaaattgtatgaattgtaatctcaaagagtacaataaatatggcaccaccaaatgacacctataaaatttgaaagctaaggaagtacagaaagtaagtagatgccactgtggctagggtgagggtcattagaagcacttgatattcaatcacttttcaataaagaataataattttcagtaaaatatcacatttacctcctaggggaccagcaagaatctcaggcgttaaagtgaggtagtctgagttccaatcctccacttttgtgtcagttttttttttttagtgtcattgatgtgtgtgtgtgtgtgtgtgtgtgtgtgtgtgtgtgtgtgtgtgtaagagacagaaggagagatggtataattacttatatatatgtgatataattatatataaacatatatgtcaatgaagctaaataatacccctatcctaagttccttattaggggtaaaccaaagacaaatatcaagtacatagataggacatagtaattaagttgtacaagttttcccaaagagttctcaggaggaagtagagagctgcttaataagttatagataccaaaatgacaagacgggaaggtatatttgtgcatgttggaacacattattggagattaatttaatgtctgaacttttgatttgaaagtaaatgtatgcctacatcatgtataaaagactgcctcttaagactttaaacctcatggattaaaggaagaatcaaacagaaagaaggcttggagccttggtttgcagagcatctgcaggctgagctacacaggtgttaagcatctaaaaccctgtcttctaccaatcatctttactcataacatttctgaagacacatctgaggtttgttctcatgcttatttacatttttcaacaatctgcctgaaaaaaattctaggtgcaaaagcgagcgtggtcggcagtttctattaatcagggtttctcaatagaatgcaacaggtaaattgaagcttgcccacattccatctcactatacactaggcctggtgtgtgtgtgtgtgtgtgtgtgtgtgtgtgtgtgtgtgtgtgtgtgtgttatttacagctgtgcaaaacatatttgatctaaatttctgggaataattttcagaaaaatttcttcagtttttacgtgtagggtatctaatacttaaaatattttacacacagcctttggaaaatcttccaagactcggaacggctaagtcttttcttttgctcacaatataaagtatgcctttgttaagaaaactcaaattttcacttagctctactttcaaatatatgcttggaaaatgcttatacaatttttaaaatgaaaccttttcattcatcacttattcctaaaataaacaatgtaagttcttccttttggccttatccttcccttttttttttctttcttcctttctttgttttctttatgtaatttgggggattaaaaccaaggccttgggtgactggaaagatggctcagaggttaagagcactgactgctcttccagaggtcctgagttcaatgcccagcagccacatgggggctcacaaccatctataatatgatcggatgccctcttccggcctgcaggcatacatgcaagcagaacattgtatacataataaataaaaaccttaaaaaaaaataacaaggccttctcatagtaagcacacattctatcacacctccagccaatatcaccccagattttgttctacaaatgattgatcaatttcattacatctatgttgtataccttatgttacatgcatgtatgctgcatgcatgttgtgtaattatgaacaaatggactccattgggcagagggtgtcattagtgatgcacagtcacaaaaatctccttctcaagctgatcctattcggggatgcaaaattttatatagataaaagttgtaatgtttgaatggcctttgataagcttatatttatcatcagaagaaatatttaatgaacattttaaatttaaaagcttactagcagtttcccttaaaagcaatggtagaaatattcccagaagcattattttaccttaaagtattcagttcaaaaagaaagaaaggaagcaaggaaggaaggaaggaaggaaagtaggaaggaaggaaggaaggaaagtaggaaggaaggaaggaaggaaagtaggaaggaaggaaagaaggaaggaaggaaggaaggcaggaaggaaggaaggaaggaaggaagcaggggtattcaaactgtctctccaaattaaatgagtttgtacaaaatcttacaaatgtgtaaaataaataaaaataaattataagctccaacttcttttgggagttcatcaaagttgttttgtttttgtttttccctccccatagctagctataattgaagtcttactgtaggggaacacactgtaatgttttgatgcattttctcagttagttgtcagagaaagagcatgaaatcagtagcattttaacccatttgacagctggggaaaccctatagtaaccagttcaagatcatgcccatcaggattcgggaagctaagttgaatctctacgaaactagggtatccacatcacttacctatggtctctgactctttccagctcatcacctgtgagtttctggttttagtggctattccaaagggagcaaagccccaatccaaccaatgggcaaagctaagtgatgctctggttcatttttctctgtgaactgtgtgtggtattaatgccttcctcctatgcatctataaagggaacctggagtgacagaatggacattcggcattattgaaaagcatgtctttctatttattgtgcattcaagcaagtatcagcaaataaccatccactaagcctggccctgacaaattgtcttgagatagtgtggctcacatgcaagtgcaggtagaggttaatacacaaagacagtcttttagagactcaatggaaagaactctaagctttaaatcaacctgcattttgctggctggggctaatagctcttgggccccaccttctcatttcacaaacatgtggggtgaaattatccccaggctctctttcagatatatgttttttttaaattttttattttacatgagtgttttgtctgcattaatgtctgcttgcctcttgcatgcatggtgcctatggaggccagaaaatggtatcatttcctccgaaactggagttacagttatgagctgtcatgtgggcactgagaatccacctctggaagatcaacctgccagttctctcaaccaccgagccaactctccagccctaaagatactattttcattgcagtgttacagggactggttttcattgttttagtttttgagagacagaagcttttaaattctgtccaaatccaaacagacgtctacaaccttaagcctgtgagattcctaaatcctgagccagggtattcttcccaattctagaatctagtcggtgagttcggtaaagtatgcctgctctctctgccttgttagaatcacaacgagttctagtgccggaccttacaatacatcgatttgttaaaactacagagaagtcaggccacatcctggtctggaggcatatcaccacatacagtgttgcctcgttaacagcctcataaggaatcctactgagtcctttctcaagggcacattttctcagggataggagaaagctagacaccagaaaacttgaacgatccttccaccccctcttgacagagccaagataggacaggcacacaaaggttgtgctgatttaagattaatatctaagcccctagaagattttgctgagtgccctctggagtacggtgtgcgcttgcgcctgctggaggtatttagacacaggagtcagggtgggtagcctgtgcaggagacaagggaattcatgaagggagacactttagcctctccttcaagtacatctccctcctgagtgcatttacttccatcacaatggactagaagagatccttgctcagtggtgcagaacccttgagatccaatttagcttttataggaaaatcaaaaagagagagacggcacaggagcaagcacacagaacaaagataggagtttgtatcaggaatattgatacttgtggacggcttttgtaactcttttgaaagaaattttccaagtaaatgctgacttggacgtttctggtagcagaaagcagaaccctgcccaccaagctatgcagggccagaccgattcagtatcagcaccttctctgtgaggctctgcttccttgatttttgatgctctgaaagtctgaaaacatttcggaaaaaacaatttcacttttaattccttaattctgtcttcccaggggtttccagaaacaggaaagttgcataaatgcaaatcaaaaccacaccagtgtccgcaccctctagttttgttgatttttttcttttcatgtttcacagcaatttccacaaatgtcatcacatcctttgttcgctgtaagtcaattagaatatctctgagaagcaggtacaatcttcaccatgcattgttcttctcggacagtgaaaggccaggttttactaactgctattggaaagacactgagactagggaagtgaggaagaaaatatatccttgtatttaaggatttcacagacaaccagggaagacattttccccactatttcatattccccaatatttcactctcaacccagcagagagtaggagaggcaagaccaggcatgcttattctttctcatgtactgcatgaaatccagtaaaccgctgtttgcaagcaagtttgccacacaaatataaagttgcaagtgcaaggagcctaaattacctttgtaaatgcatgttagcactgtagtagaaaactgacactaaaaaaaaaaagaaaaagaaaagaaataggagtcttgaaatcagatgttttactgcccctgaatatattctggctgtactgggctggggtcctaatcccattgaatctcaactttcttggttgtccaataagagaatgagacctacttcattggatagacacaagagttaaatggggcagtacatgtcaaatttagcaggtacttcactggttgcaatatcatgtgaatggcaacagtcatatatatttgcacataaaaaactggccttgcttctaatctgccattcaaactgctgaccagctgcctcctgcacattggaaatctgcttgagttctgtttaaccatacatcttgcctggtaacaggctgaagcatcatctctcaccttagagcatttcaaaccctggcctgcttactatctatagctacaggtctgtgagatacaaatgcaagtggtaaaatttcatgataggaataattaaccaggttgaggtgttacattgagccaataatcttcatgtagccaacctatatttagtttactagactacaggatgctaactggtattccctacctcctagaaagattcatagggcacttgccaagcttggaatcctgccagcattacaattcaagtgtacctgtgcattactcaccaaaactaagctgaaactcttgttttcattctaagatgatgatttactcagaataatgtttcctctaagggtctacttgtaaaccccaaatgattcatattgcaaactccagctgtaacaacaatggtatcctccagaaaaaagaaccacatgaatattgaatctcttgagaattttccacaacagatctaggggtgatagatcatgcaaactcattctataattaacctaagtgttctttttccttcatcaaaatccagatggattagcccatgaccttttactgggtaaatcacagagccttgatttactctgtggtgcaaaattaaattcagattttaaaatgcaactcaaaaaatccaaacacacgttcaaaataaactaaagaaaggaaggaagcatttttacaactaggaacatcagtgaaattcactaagaaaattgaaaatgagggagatgtaaaatacatgtgagtacctcatttccatctcccagctcaaattctgctaaacctaacaatgcccagtcaagaaaccaagtttcctttgctgatagaacacaggacagtcttcaccacaaatgcaaggttaaatgacaaatttctatagaaatactctatagaaaactctcaaaatgtatctgagaacttttccacaggaatcttccaaaacctgctcatcctactatctaagttgatgagacagacaaaccaagaaaaccagacttgggcagtttagtcctaatctcagaatgccgaaggtacttgttcaccagtttaccagtactgcccaaaataggtcctgatgccatgagtactgtcctgatttgactgacaaacttcctccataggaatatttgttccttcaaatatagttccttcctatatttgaagacttggtctccagttagtggcactgtttggggaggttatgaaaactttaggaagttcaagattcacaggaagaagtatgttgctgagtgaaactttgaggatttagagactagccacttcctgctctttacatgattcctgggtgtggttgagaggtgatctctcagcttattattcctgccacagtgccttccccaccactgtggatatgtgaggacctctggaattggaagtcacaatggattcttccttctgtaatttgcctttagtcactgtattttatttcagcaacagaaaagaaattaatacaaatgtttcctgaatgcaccaagaaagtgagctgtacctcatgcctcagtttgtactagcatgaaagcacagctatctttctggggatgctttactacaaaattgtaggtgaataactgatagatggattggtgggatggatagatagatagatagatagatagatagatagatagatagatagatacatacatacatacatacatacgtacatacatagatacatagatgaatagacaaatagatgacaagttatatatagatgatagatcatagatatgatatagatagaagatgcaatatacatagaagatagatgataggcatcttcagaaaatatttgtaattactcaaactgagcagtgcatttagtacaattatttaattttagcaggcattaaacttacatatacattctagtcatctaaaatttggccccatttggagaattgcattaccctgaagttattgatttctgtgaaaatgttgaaaatttctacgttgtcttacataataattcggatcaagaatttttatcatccaagtagctgacatcaaaacttcacaaacattagaaagatagtaggtaaaatgtgatgaggaacaaggtcgaacccgagataggttattaactgacaaatttggcactccaaaaagtctggtccagatgcttccgagacttggcctgagccccacgagagagcttgtgcctcctgtcctctctctttatcctacccctctatcttcctgtgatgacacccaaatgggcatggtcaacagtacaggtatccagagtcactccctacaaaaatgtaccttttgccaggaagtgttaaataaaataattcaaaattgtgatgttactgcattattttccaagttacaaataagccaagaaatgagggcacactagcagtaagataaagtctgattcttttgagttttgctaaaataaatgatttacaatgttgtctgtcttgtgcctccctagctaatggaattagtgttcagttctcaaataacacttccccaaggaggaccagcagatattgtaatatgtgtaggttttttttttatccaatagtagcatgtaaactgaagccattcttcagtctttcactaaatcaagacaataaactaaggaaaagaaagaagagaagcatattgaccaatagaggcatcagtgaatttcactacaaaaactgaaacagaagcagaatgtaaggcatatatgagtgcctcctttctggcttctgtctctgatcatctctaacccagcacacaggcttggggtgattccatttgagtttaggactcaaaaagcattttccccaagatttgacgttgattattagctgtgggttttttcaaaatagttgatttattttctctcctaaatttatactttcttactcctgttgtttctgagtttctccgtcattttatatggctctaaaaccttggggttaattttctgtcttctttcactaaacttctcttatctcttctatctttgggggttttttcacttattttatcctactgatcttttaatattttccctacttacttaaactttttgtctcattcatgtcatcatatttttcttatttctcagaattttcactcttgcatttaaatatctcatccttaggcaaaagcttatcaagattggtattgggttaaggaagaggagactattgaactgggttacacacacagaataaatctttagcatgggctatggatctaatgcataggcacatttatgtctcatctgcacacctcacaactccaagactcaagccagagtcttcaaaataaaattgtggagctgattgctagggcctcatagtcagaaggttaacaaaaaaagaaataatccatgttgttttccacaccaactttccagctagatgtttcattctagagactgttaatcaaaaatattgtaaattcaactactctgtgtatgtttgtgtgtgtgacattttattagttgttttagaattttgtacattcatgcaatgtatttttatcatatttgttctccactcctccccatatcctaggtctacccctacttccttgtaacttccaagtttttttttgttagataactcactgagtctaatttgtactgcccacatacaggtgggtgtagggccatccactggaaatggccaacctatcaaaatgatcagtcattttttttactgttgaatattccttcaaaatcaatattaaatgtgggctactttggtgaatcaattacacagctgaagctactggagtttattcttagtctttaattcattacctacgaaacaaccttgagaataacttgctctatatgtaagattaactttttagacaaaaaaaaatcatgcatcgttggctgtatttcatttataatattagatgtgcactttttagaaatgaccttgtttcgggatctatgcttgttctgagggagagaaataaagacactttcatatacaaaagtcacagataaatccaaacaaataatgccaatacagtataagaccctaggcaagggactttagtctgccttgggtagcaggtgatgggagagagtgagcaaatgcctaaataaagatggtattccttcagagagatgatgtgacgtgatggataatgaaaccaatcaaaagtttgctataaaagattgatgctacagcttcatcattttcatctcctcaatattgccttgagagatcttgaaggaaatctgaaggtcttgacttctgccgaaaagctaattaactttgtttctgctgaccttttctttcccttcctataagatgagctgttgctttaaacacatgcatgaaaagcttcaactaatttataggaggagataatgtttaaatatttattctgttgtttgctcaagctatccctgtagtcagtctcttctatgtttgtataatgtaaacacttctctcagtcaacgctggctttcttcttgtctactaatcaaagcttagatcaatcattataagtcaaatatgaaaagcaaattcaaaatatgatatttatctttcttttaaattgaattatgggaaaataatgtgggatattgtatcacattatggacaaagatcacatttggaaagataacatttttcactaagcttctaaaaatatttctcagaaaatatgtctataattctaataacaaagtacctcatagactaatattctcataatctaataagaaagaactttagaaagagaaattggtatttgcagcttggatttgctatagcttaatctagggatatgtgtgtgtatgtgtataaataaatataatactcaaaattactcataaaattataattaattttacataatattaggtctgcttagtaatctacatccttaatactagtaagtaaatacgaaatattagatcagcccatattatctttagatcaagaatgacaaggctaaactcctgattttcagaatataagcactatttcattttgtcaactaaatgggaactgaagaaagaatagtgtgcttgtgttccataatccctactgtgacttattaatgcctttgtaagcaaaacagagaatttataagggttgaaggttatattgatttttcattaccagctaaagacttgcacactagataaaagaaattctaacatgaagtcagggagaagtggtgtttcttaaggtccttttgaaaagctcagtaggaagtcaaacagtggtataggctagttaataaagttatacaggagggtggtagaactttcaaaatccaggagtatggcagtaactgaaaagatcaagaatgcttaccccaatgaaacctgcattccagaaatgggaggcagaaactattcttaataagtaaactgtcatatttatgatgcttatcaattctgaagagaaaaattaaacaagggaaagaatggagagtgccagtatggtaagttgtggggaagtactcttttttagtcgatacaataaaaggaaaagtatatctcctattgccaagaatagtattcaaaagcataggcttggtgccctttatcacaacctcctgatttttcagaagaaagaacagagctacagaagttcacattttgtctaagatttgacaccatgagttcaagctcacccacaggtggccagcactctgcactgtatcatcctcgtctcttaggagtatagttgtcgcttcagtacactgtgttactgcaaacaagttcagagtaactaaactgtttcattcttccaaagcattgctttacatctcaccagcagggtgattttagactaacacgttgactacacacacttgaggacagatggctgctaacaccatgatgtgagtgatgacacagtcaaacgtgatctccaagtgggatctcagagtgactttcctaccacagagatccatgcagacgatcagcaattatatagtttactaaaatgcattttaagctttcatgcgtttttaaaataaacttggaacctgccatttgctttctcctaaatttaagtggcagaaaaccagaggtcatttttctgctgtagcaaagagcaaagggccccgagggaagaagaactagagttccccaacttgagtcaaactgtgatctacataacaggagtggaggttctcaaagcccaagtgtagaaacacattaaagtgcggttattgctagaagtaactgtgaaaatggtactttgctggtgcagctgctcccatcgcatttggtttactgaaaaagaaaaatgtttattatggttaggactacaagcctcgggcattgacgtctcaagtgtctcctaatctctcctcgaacagccgtccgtctggcggcaagagagccgtcagctctgtatgtttgaatgcaggatttagtgtgccaggccaaagtcttgttaccctttctatttgtaaactgtgagcaaactagacaaagatggagacagactgtagatatacccacaattgttttcacattctcactctgggttttcaatagcatttaggaacaacccgaaaattgtctcttttaaatgtaatgttttgttttgtcttttttttctttaattttactgagatcaatccctttctgtttatagtaccatggcagtgtttcttgatgagttacatggggacagttctgtgtcctttgcttggggatttgctcacaagtgggaaaagtcacaaacatttgttgtgtatctacttgtctaaattttagatttatttcatttactcttaatgaaaaagaaatcatgtgaagtaggctcttgtatcaatgtcatagtttagatgtgggaatgaggctcaaacaatttaaataacatctgcacaaatgggtgtttaatatcagactatgattccagaccttcatggttcaaattcatgaaccttctttcaatataacattggaaggcctctctgttcaatcaccatttcatcaaggggttctgtattttctatccacgaacagggttatggactaaagtattgttgtcagcatccaatttttcataattaggaaaaacttcacatgcctttagttgatgcttttagggaggcatcaactttcacatggcagtcagtgatactgacttcatggaatgcccttgagagttttggagcactttgatgcatacgtagcagctgactttgaaatggttttcagtcagcatcagtgagctcccctcattgagaagacccaatctggtggcacaaacatagggctttccctgattaggtggcacagacagatgaaggagaggcaacaagtcaagtttctgcttcttctaagatgttcttataaccccaaagtgccctgttcagaaggtgtatgacaatcctcagaccaagaaaatggcttgcaacctccctgtttttctgtaattcgtccttattaagggatgatctggaagctaaaatgccttttttaagtgagtcatagtcccctttcaaaaaagccaaatttgtagtctcgtgccattttatcccttctgttaagagattggtttatatggcccagacaccttaagttcaagcttctaagtatatatcctacacatgtacacattgcataattacctcctttaatatgcaaaagaaaaatattgaatcttcattaaaaaaaaataaggacaaataaactcagtagcttttttctttccaccccaccctaatccccgtaaatttcaagtaaaccttacatgagagcttcctctgaagattgctaactcttctcgctgatgggaaatgaagaatgatgaattcttgttcttgaaattcattgtcaaaattattgccatctaaagtcatatcatgaatttttttcactggaattaatgctgtgaggtgtcagaagcctatgaaaaccttcagtgtttcttctcatttaagttgacatattgtcaatgtgaataaaattaaagaaacacataattttgtgtaactgtctgcaatacaagtggtttttccaagattacctatccctgatttttaacagcagtgtgggtttctaggtccaaaaccgtgagtaacactgtattaaaaaatttaacccgttagtttaaaatttagccttgagcaagtttttaagacaagggtagaaaggagtcacactttttgccagaatatcccaagaacagtctctaacttccttatgaatgttgtccccctttaaaacctcttccactggccctccacagtccaagttgctctgtgcaccaactttcagagtcctacttagatatcccctcttttaattcaaagttccaaaatctacattcctctatagaataccatggtcagggccttcaaaataataacccattccctagcacaaatttctgtatgttactttttactttttttactttacttttggtgtgataaaatgccccaaccaaggcatgaaacagaaagaataatttatttgggcttacagtttatagcagataagggtccgtcacctatcattatgacagggaagcatgctagcactcaggtgtggcagctgaagcacctggcttagagctcacacctaaaactgtatgcaagaagcagaaagagctaactgagagtggcacaaggctttggaactcaaatcttatcccaaatcacatgattcctccaacaaggccacacccgcaacccacccaaacactaccactaactggagaccagataattcaaattaccaatatttaaaccaccacacaagcacttttactattcttccctatggcattctccatgtagataaatgcaatcctatttcaagaaaatgcaatcctatttcaagaaaatgcaatcctatttcaagaaaatgcaatcctatttcaagaaaaatcatgttacttaaagagatacatttgaagatgacttaaatctagcaggttctttgccctacctctttcctcttctgttttctctatgatcaggtctgatatcctgccccaaagtaccactccaagcttagttttgttttgttttgtttttttctttctagtttcattgtctctccatggaccttatttcgtatgaggtcttaatgctataaagagtcttcattcctttcaaaaggacacagtgatatatatatatatatatatatatatatatatatatatatatatatatacatatatatactgatggtgagctactccttccttgggctagctgtccttgtaacaccctcatcatcagcatgtccttcttatgccattgtgcttctgaaggtcagtagtgagcttagtgttcaggaaatgcttagtaattacaaatggtatgataacatgctgtctaggttaaaaatcacagctgatgtgatgggccatatgtgtgcatacatatgtgtgtagctgtgtgtgtgtgtgggtgtgggtgtgtgggtgtgtgtgtgtgtgtctgctattacagaaaaaggtatagcacagactgcttttgtttatttctctctagtctctttataaagataatcttaaacaactagtatatgccaggggttagaatacaggctacactgtactttttgtttgtttttgtttttgtttttcgagacagggtttctttgtggctttggaggctgtcctggaaccagctcttgtagaccaggctggtttcaaactcacagagatctgcctgcctctgactcccgagtaacgggattaaaggcgtgcaccaccactgcccagctgcactgtacttcttaaagaaagagagagaatcatgtgggcaaagaggccatttggttttgttggactcattttgaataagttgccttcagtttgaaactgtgcaaaaaaattaaaaactaaatttccagctcttttggtaagaaaacgttgaaagccattaaatttgggtccgtatcttcagactgaagctgagaactggctgccatcttcagatggccacgcccatcatatttcctgttgctcaccacccctgcttcactcacagcacttccggcctaggttctcaaggcatttgagctttctgcctctgccccagacaaacatttctgaaagactttccaagtcatttttataaaactatctcatgaatgccaattctccatgagggaaaataatagatgcttgcctctgataggttccattcagtgtcaaaatatttttcctgtggctttcctcatgtgtatgcaaaaatttgccagctttccgatctcgttcctcaggagccctcattcagttgcttccactctgggaacatgatgagatctgcatttttgaaatgttctgtaaaatgtccggaaaaattacctacagtggcagtgacagcaccatctctgacctggatagtacgaatgacagtaagctacagattggagcccctttggcgtggatatttttaatcacagtgtaagtctccgatagctaacatactctaaagcttattgtgttgctgttaaaaaaatccactccctttacttttttagaaatcaatttaatatggacggtcctgtcaagcttatttaaaatgattgcagggctgaacatcagtccagaaagacaatggtgccggttatcaccgtgtgcctttgttatcatacccatgtgactctgtaacagacagaacccagagagatgctctaattgttaaagtatgcattactgctaaactctttaaggaaactgactgtatactcttacagaagagctgaagtcgtgcaactttttaaaagagacaaccgcctgttgggggtagcaaagagcctgataacaacggacattagacctttgactcctatatttaatcaggaggaggaaagataatttccctaaatagtggctggccactgtgataccagggagcagctttcgctgacagaattacccggctcttcactgagatttcttgcaacagatggattccagatgtggctttcccatgatgcctctccgatctcaccagcatccctttccatgtttcctctccccttactctggttcaaatttgccaggttcgtgtggggatacagaacacacaaaatgcccttcaacactcccggggccaggagggaagctgagaaacaagtttctctcagatttggaattctgactggcatctgcctgtctaagggtactagttaaatatgactggtgattgactgctactgtttccttggtattgttcctttcccacctttaatctgtatggacagtaatggaagcggccgagaacagaacacaagaacacagaagccactgtgcatgttttgtaccctccaacctaacaggcactttgtcttttctatccttaatgttaatgagctttgaaaaaaagctgtagttttttcatgtaatgccattgcagcttgttcaagggtcatttgaccatatgttgctcatggtgtcagattgatggcttcatttgtaatgatggaagcgaattctaattagcagtcctagaaaaagtcaaactgagttctgtatgagtctatccaaccactcatatcccagatgctaactgacactgccccacccccaaaaatcacaatatataaactcttctaatgctgacattaccgtgggagctcgacagtcctctcagtcagaaaatactttgacatattggttacaataatattttcactctgcagctactgtatcccaaagtggctatgtcgggacatcattccttctttttctgtttcctcaaccacaaaacggggctcacaattggatttgtcagctgcggagctaccctaatatagcagcagatgaatccaggcaaagagcagatctatcactgtatctgactgatctttctccttatgcacagtgacaaattctcacctctccatatagatcagcaggctcgggaaccagtcagtcacgcataagttgtgacagtgcatcacaagactggcaattcagagccctggagaacaaggtgaggtatgcagttacttcacgtgaaaactgcagtctttccccaagcaacacagggcatcaacacaagggtggggccgcatcatcttacaaaaagagacatgtggttctattcacgttattaaaacacatggagagaagagatgaaaaagccaatcttttcaccttggagatttgcattgccctttggataaagcctatgcagatctctgtctccatcagcctctaggttactcaaaatggataagacaagggagtgtctagccaataagatcaggcagacaccctactgggatcacagagctccacctacaatgcccaaaagaaaaggggagaaaaatctctacattttccagccttctcctctcattctaggaaaatactttctcacgatattcttaattgcctaacagagtcaaaagctcctatttctatctgttgattttagaattttgagagatggtttggacatttacagggattttagagaaactgcttctctcattccatgatgaacacaaaataaaaagcatggctgctttgcaatgtttcgagactgacctgagaatcttcctatgtgcagtcttaatttataattctggaagaacacttaatagagagatatagcaataatgtttatgtgtgatgtataggttagtggtatacagattaagtgtattttatgcttgctcactcataagaagtaaagttgaaagaacaaatgtcttgacagcaacattatatagcattttacaggtgtgattttacatttacttattaaaaattacaaaaagctgtaattcatgactttaagataatcgtgggtcactaactcaacagatatttgcacgtaaaaataataaaaccaaatgtaaaaagtaaacataatttatataataaacttttctgcttgtataagctattaaatccttcagttcagttacatacacatgcaaaagaaataaaaaaaaacaaagaaacctactcaactggtggtcaatccttctatagataacatcttggtttttaggtttaaatcaggaaagcatggccagagagaatgcttagcagctaagagcacatgatactcttgcagagggcctgcattcagcctagcctccatgtgttgtctctcaaccacaggtatctagagttctaggaacctctcttgacctccacaggcatgcagccggtagacatccatacatgcaagccaaaccctcttgcacacacattaaataaataaatcttaaaaatttatggagagacccatcactgacaaaggtctaagacacagcttgcaaaccgaataggaatttgatatcaaagaagagtggagtgcagaagaaaaagaggaaactggaacaaaaggcactaactgacattttcctgtatggaagcgaggacagatgctttattttcgcagactaactgtgtgggtccacgcaagacctcagaaatacatgaactgaaattcttcaccactttttgaaacattaaaataccagctgttcaaatatgtggataattgagaagataaacagtccaaaatgtcccttcctctcagttttctggagcaaactcaactgactagataattcccaaccagctgctcacactgcctgtcctgcgatgatacaaccaagtcagtaactctaaggccctcagagaactgcatagctggagtcatttattatgttattccagtggctcaaaatgagaaactacagagagagggcaccagctgactagcccaaggtcacttggtgtgcagggggaaggacaacagcttaacacgtgccattcaaaaggcattgaacttgctaaaagggaaggatgtttgaacctcctgaaaagtgttaaccattcccagagcccaccaggaacagttctcacacccgaccttgagagttgatgctctgcacgctgctagtgactaagttcattctagaagccatgtggtaggaacacaacagactacaagagtgacactgagtttacagagaacgaaaattactccccagtatttcggcaacttacttcacgttcctgaactagttaagaactgagctacgaatgtaagcacctttattcctcaaacatcatgctgtttccagcatatcaggctgccttctgcgtcactgcctctcctccatgctttctaccaaaaaaacaaaaaaacaaaaaacaaaaacaaaagcaaaagcacccactacctgtttgggtagacaaagtctagattctcccatttatggagctagcagagtcaatcaagcatcaataaagaaagcatctgaaaagaaagtaaggccatttttctccactgggccgtctggtttctaagtgctgtagtttctcctattcatgttttcccactcaaacaaaaaaaagtcatcctgtatctcctgaaacttgaaaattctcattttttcccttcacatgtaacactcagctctggttaaatataaaacaatcttcaagcaggtgtttgtttgcttttaaaacaagaatgacatttagctttagtcattctgcttcaaaagtaagcattttattcattagttcaaaatgaaacattttcaaagggtttcattgctgactagccgtgagccatttgaagttctaaatgtcatttgatgaagttgagaagtatggatagagaaataacaaagatcattgttaactaatgaatatacaggatccttgtttgcaagaagctcctggaatagccctgaaagagctgaaagatgttactatagaattccctctatacagctcactgtttgccaccttgatataaaaatcaaaggcgaataaaataaaactctagaacttaaaaaagaaaaagggaagaaactttcaaaagtttgcctatttggctaaataatggataatagtacactggcttaatgaaaaaggctatatatgtggttactgacattaattgttaagttctaagtgattattactgaatcattaaatttagtgtacaaatactgccatgagactggatataagcattgtgtctgatccactttataaaatgattctgagtagcacatggcaaaaggtaacaataaaacacacacacacacacacacacacacacacacacacacacacaaagaggattatgggaaagagttgaatagtaaaagggaaataatttagccataattaatagcagggtcctcagagtcggataaaactgggtttgaatccaagcttgtggagctggatgaccttgaacaattttttcaagctccctgatccctccacaatgaatgaaaaaggcataataaataacagctacctcaaagaacatgaaggtgcctgcaatgtctctgttgatgcaccatatacaactagacacaaaaacagaaccctggcctggactctctgtcccactggtgattatgtggaactaaaaacacagaagctgagctaaagctcatgttctatgaggctagaaaaaccaacctaaattgaaaacaaatcctggagaatgctgtgactacacctcccacactgagctgtagccagtaaggaagcgatccattaggaactggaacagaacagaaccaaacatatgataaaatgtatttgctttggcctttatatttgttttgaagcattatttgggtgttataggcttcactttggaacactcttaaagtgtaatacatttagaaaagcatgttctataatgccatgaaaaggggggaaatagtccaagatgggctggtgttgggattaaaacaaatcaaaggaacagaaaattatgtgctttttaaaaaagtactcattttgaattagactgggactttctttgggtaactcccatgagaatttcttgaaagtgacctatactggtgcttctacttccatgctggctgccacatcaaggaaccagacaaggtcttgctcatacagcacattttcttcattagttcagtctatgaacagagcaacagtacacaaatggcagacaccatgagggtagtccagagagtgtaagggtggcacaggtgcagtgtgacaaggcacggggacccaggacccttagtggggggcgggagacgtcaggtggtaagaagaggggccactttccagcacaataccaagaaaccgtaaattttgtagctaaatcctcctgcctcagcctaccccaaataaagttaccaagggaaacacaagttttcttcttggctcagcccatttggatcacagataaggaagactgtcttaaggaaactcaaaaacaccttagtttggttatgtttgagtcccagcctttatgagtcaggtgactcatgagggaaactgggataaatgcaaattgtaatcagtttcacattgctctcccagcagtaaggcaaagtgtgcttcttccactgggggaagaaaatcaagaattccatattaaacaaaaacaactgtgtttatatagttagttatcacagcttgaaaacatattacaagatatactattgaggcttctttctataattttcatttcattttgtatgtttgggtgctttgccggcatgtatgcctgaggaggtcatctggacatacagatggtcggttagagtcaccatgtgggtgctggaaattgaatccctgacctctggaagagcagtcagtgctctcaactgctgagccatctttcaggcccctaaataagcatattgcccatgcccatactccatgtactcttactgtggccaccctgagaactctactttaggatttttgtgttcttctacttcctagctgtgcaatctcaagcaccttaccctttttgtgctttagtcaatccataatcaaaaatgaggggaactgtatccatagcaaaggctttaatgagaattaaatgacttaatatcaataataattcataagtgtatgtaacaaatgtgtttgttaagtcaacacagatgtatgtttaaaaaaggaacacatgctggagatttatcttttatacacaaaaagtagaatataatagtatattactgtataatttggcttctctcacttaaaatatttgacttttggtatcgtcatcatttttattttcatagctgtatattatttcatggattaaatctacaataattgactatcgaggatcatttgagattttccaatcttttgatttttgttaataatgcctcaacaaagaaactcacaaaaaatagcactgtgaaggtttgcagaaaaatccacaggacagatttccagcagtaagattgctcgtccaaagagcaaaagcatttactactttagacagattgccaaactgcttcttcttgtggttgtgccaggtcagaactcacccagaatttggggaggcgcctgaggaaacattttgtaaaggtacatttgctgagtaaaactcaaatatttctaagagtgggggcggaaatgtgaaatctagaattaagagcagtctggcagatcatgctataatatgtttaaaagatgactttaaaataattatcaacaaaaatcaccagtgatgtgtataagaaaaatatattaatgtgcaaacaaccatgtcaccttcaacctggcttcatggtcttacatggtttaattggctaactcctctcctagactgtaagttgtagtgttttcagagttttgagaagtcagctatccaagctcttgacttgtgtttcatccatgtgaagtttttcaacatttacctacaaaattaataagctgtaaagaattcatggataaggtgagagaagaagatattgctgctgccttcatacctgagctgccaatcattaggaccttccattttgaaggtggactgaggaggcgggacagtgattttaggaccttccttaaacatggattatattgagaagcctacatgagacatgagggacagcaatgtttctaccccgattatagagggggaaaggccttcttaagaactgggaaaaccatcctcttgttgcctggcagcataagtttatgctacacatatggggagtcctaattcaatccacaaattgatttgagataatagacattactctcagtacttactgagtgcaagtgtaactctcttaagaaaataaaaatggaatttcaatcctgacctcaattctcacagataaattgaggatgaaaaaaataacaaaatattgacagaaatgagatatagggactgaaacactagacagaataatcagatatgtcaagacttgaagcattaagattccaaaaccaaaatatcaaatcagtattattagaattatgcctcgggaaatataaggtgtggcatatgtgaatggcagaaaaaataaaagaacttttctttgaagaaagcaaaaaactttttgaaattaaaatatattagctaaagatccagggagatgttgaacagttaagagagcatgttcttcaggcagaagacccagctcatgtctgtctcaactcgatcccacagaatctgactccctcttctggtttccatgagtgtcatgaatgtatgctgcacatatgtatacgtacatacatacatacgtatgtacatacactggaaatgcccatacatgcaaaataaataaaatcttaaaatgcatttttgattaaaattaaatggcagaggcctataaaactgaaaatcacaacccaagaataaataaaggcatatttgaaccttacccactgtgtcatacaacaaagagacagaaactatggaagacaaagggaaagaaacagaaggctaataaggcaagcacaatctttggaaccttagtaaaagagagggaatgtgaggcaatgcacatgattcttactgtcagcaatttttcacaactgggtaaaaacatgttattgctcagattcagcaaagtgaccacttccctgatttatccaatgtatttttcaaaaaagctcagtgccaactgcactcaaaggtttataattccaagatgaattgtccaggtgtctttgcgtttctctcagaacacagtccccacacttctcagtggccatttctccactagtctgtgggagtccaaggaccttgacagagtctgacatttacttatcctaactgtgtagtgtcagcagcctccaacatgctgagcctcaacattcttactcttaaaatgtgaataatgggatcgtccttaagaagaatggcccatgaacactaaatattagagcacatatgaaatgcccaccatgctgcctacttattttgggtgttcggcacacattcactcctttctactcactcatactgaccatagagccttcaacacaggggcccactgatatccttcagtcaggtacaacacactgttcactcatccactgctgtttgatgccaatcgtgtgagactgacggtgtcaaaaataccttcttctagtcaatgcagttagccattccagcccatctacaagtgagcaccacctccaaaggagtgcctctagcctgagctgtaggacagataggggttccacaggctatagccttcccatcagagggggctccccttccttcatcgtatgtcacagctgcatttacatcttgtggaaaaacaatgggctattttctctccttatttctgagaacaccttttattggttattcattatctcagtcaacaacttcattgagctatctttttccctgtgccaggccatggcatcagggccacatcagatccaagaagtcacaagctctttctaaaagaacactcctggtaaacttgagagttcaaggaattatagagtcaaaataaaaaccttagattcaaagaaaaagaagcaaaggggttagaattgtcttgaaataacatatacatttaaatagaaacaaattgattaggtaaataatgggtctcttatcaaatctatcaaaaactaatatactcctctatcagtaatcttgaatagagagatagaagatattctcctgtagtgtagtgcaaaggaaattaatatcatttcatcagtgtggggaggatattactggaaacagtatcagctaaatgcgtgtaatatgaaagttgttttcatcctaatgtgtaaggtctgaagtgatttggcttgtagttaaaaggaacaccttcaagctagactcctgctgctaaacggtgttctttccagtgccctggctgagggctgaaattgaatggaatctttcagattgtaccatgagctctgtttggtggaagagagcagcaaaaggtgctgtcagcacacacaatgccttttctccttattttgtcttcattactgagccgcagatcctgcctcatccaaacactcacagacttgctttggcctctgtttgatccattctctattgttatcctactgattggaagacacagatattgatggtgattgctgtctggtcacatggaggaggctaaaatggcccatgttagtccagccagccctcttttctttactctcgcacatgcataaagacagagctgtagtttccagtggccccaggatcctgaggttgtatatgtacagtttggttctgaaaatggttaaaaccaaggtctgggaaggggctgtgctccagtgatggctgaatcatgttctcatttgcagacagtgcattcacataatagtcaaatgcactccaggggaagccatcacaacttagaggttcagttctatgctaactgaccagccaatcttcagagttgagagatctccccacatgtcactttatacttcttttgttccttctaactcctgctacaaggctttcctatgatgctgtggctcagagaagtctagggagccccatcaaagcccaatctgccctgggctttacacatcctatccaaaaaatgaagatgaactttgggagcaggtgcttagaactcaagagtcagactgaccactatttggatgaaatcagaggacatatttaaccctgcagaaatttgtctgcttcattttaagttggggatttgtaatgtagataccatagagctttgtgtggggattgataggaagacttctgtggattgttacaaagtaggcaaatgtgaaaacgctcttctctctgtttccatcatcctcaaaattctttacagcacttattgagaaatgggatgtttctgctcccacagtgacaattggtatccatttggaagaacctcaaaacttaaagtccctttctcccaattattggcttcaaagaaattttctaaacatagtgttataacccaaaaatgttgatccagtcaggaggaggatttctgatagtttgatagttgaagttgaagtaactattatctatcaaatatttccattagttttcacaaacaactaaccaaattgacttcttgagatatgtttatgtttatgggagattcatttattattaccatggagaagtcattctgtgttttagtggagatgcaaatcaagttttcctgtttatgagataggaagggtatttgtggactaggcagtatttaaaaagagaatctgcaaataaaattgaaaaattggagaccatcaagggaacaagaaaggacaagggtcaaggtttgagggacaatagcatcaaagcaatgttttagaagtcttctgacacatcctcttagaagtccataaaaccatctctgaaacagatcatacatatatcaggacacaaatcaagtcttaacaaagacagggacatcaaaataatgtcttatattctactttccacaataaaacaaaactaggaatcaacagtaagaaaaaatgcagagtacacacaaacttgtggagacctaatggcacaccattgaataatgaaaatgaaaaataatcaagaaggaaacataagaaaatgcctgaaaaaaggagtgaaaataaaagcaaaacatacccaagactatggaatacttcttaaaaaggtagcttaatattggcatgcctacactaaaaagtcaaacacatctcaatatacaatataataatgaaacttaaaacttggaaaaatactaataagccaaaccaataatcagaagaagagaaaaaatagtaagatgaatgcaagattttgataaaaacaaagactgtatgaagtaaggagtcatttctgtgaaacagtaagcttagtcaaactaatcaagagggcaaatatccaaataaattaggcataaaaatggagccattacagtgactgccaaatacatttaaaaaaatcattgtgacataccttaaaaacttacattccaatatcttggaaaatctaaaaagaaatggattaacatctagatgcatataatctaccaaaattaacctaaaaggaaaaataaacttgagcagatctgtaacaagcaacaagattgaaacactaatttaaaatctctcaccttataaagtgtgggtctggatgaattcactggtaacttccaccacacatttaaagaattaacatcaatactttacagtctattttaaaaactagatagagagggtatgctactaagatctctttataaagtcattattaccttaatatcaaaattagtaaaagaaggaaaaattataggccaatctccctgaaggctacagatgccaaattgtcaatgaagtgcttgcaaacaaaatgtcaaaatatcattctacatgaccagattaactttgttacagagcttcttggacatctcactgtactcaaatcaataaatagtattatttttagtatgaatggactcaaggacagaagtcatgtgactgtctcaaaaaatccagaaaaggcttctgacaacctattatctatacacaataaaaagctcccaaaaagaccaggggtaaaaggaacatgcctccaaacaataaaggctatagacaacaaactggtggaaaacattgtactaaatgagaaaaattcaaaacacttctgctaatattagtaacaagacacaggtgcccactttccattcttatttactctgcttgaaatctttcctagattgaatgataggagagtaaaaggaataaaaatacaaaaagaagaaaccaaagtatccttccttgcaggtcacatgagactctaaaggctgtctggaatacttttctaactggtgaacactttcaataaagtggtaggttacaaaattaacaacataatcagtagatttcttatataccagtagcaaacatgttgaaaaagaagtcaggaatacagtttcattcacaattacaaaaacaaacaaacaaacaagcaaaacctaacgacagaaattaaagctgtctctagtgaaaattttaaaacaccaagggcagagattgaataaaaccactagatgatgataagagccctgtgctcatggatcagagcaattgacatgatgaaagcaactatacattccaacctacagattcaatgcatatattatcaaaatcttgatgccattcttcacagaaatagaaaacaagtcctaaaattcatatagaagcatgaaagaccttgaatggccacagcaaacctgaaccaaaaatataataaagaaagaaatgctggaattcaagttttatgacaaactatagaaaaaaagaatgcctcctgcacaaaagacagacacaaagatcaatgtcacgtactaggaacacagatctaagccacatagctatagtcatgtgatttcttaaaaagatgtcaaaatatatattgaagaaaagacagtttcttcaccaaaatgacactggaaaactggatgtctacatgcagaagaaggaagctagttcttatctcttggtctgtacaaaaatcaattccaaatggatcagagacctttaatataggacctcagattttgttataggacaaagcaagaaaaacattttaagacatgggcatagatagaaactttttgaaagggactccagttattcgggaagtaaacgcaataacagagaaccatggaattaaaaagcttcaacactgggaaggaaaagattaagctagacaggatacagtgatgtaatgggagaaaaccttgctgatcacacatcatatagaagattgttatctagaatatataaagaaccaaaaactaacaaaaaaatcaaactcaatatgctaatgaaatgaagagagttctcaaaagataagggtacccaattaatatgaaaaaatcttataagagaaatgcaaattacatttacactaagattccacctttcctagctagtatgccacttatgaaaaaaaagcaaataacaacaaatgctggagaagatgggaaaccctgtacatagcaggttgaatggtaaactagcccagccataatgaaagacagtatggaggttcctcaaatggaactaaacaatatgaaccagctgtatcgatcctgagtatttactcaaggacttagatgctctaagtcaacacatcacagggacgcttgcacaccactgtttactcaagtattgtttacaatagctaagttatggaactgacctggatgtccagtagcagaggaatagataaagaaaatgtgatgtgagggatatatatatggagagctgtaatggtaatagaatggttgtatcttaatagatatgaccagaagagtggcagtggtgaagtgtacacattacagaggaaagggctgctctaaagatgtgactaatgggaaaatattggcccgcatgacctagagaagctcataagttgattttgaatttctaagtgtggtgatggggaaaaaacagcagcttcggattagtacctgtgacaaggtagaaaattttggatttatatatggaaataggaatttggagaaatcatcttcggaaattactgcagcaactaagatttccaatatgcaatggaataagagatgaggattaatagagagttgtggaggactgattacatttggctggcagggaacaggtccaacaaggaagtcaacataaaaagcactgatgtagccatggaaggtggtatgacaaggatgcattctgcagaacccttagctgctgaaggattcaagaggaaggaaaaagctaggaggaaaaactgtgaacgtggcaatagaggattataaggcagtgaggtgctgaatctgtgcaggtcttgattctactgggcattagaatcacctgcagagttgttgaaggtgggattgtgtgcatcacaaacccacgcctagagactaacaaagacagtttaacatggaatctaaatctctcataagtgaaattactggtgatgaaaactggaaggatcactttctgattttgacagtaagatttaagattggattctttctgtaagaagtgacatttaagtacatgtgcaggttgcatagaggatgaaaactacagaaagacattcagaacagatgccttctcgctggtgaaacctagcccaagggaaagagatgggtgtgagatctgaggtgtagaaaacctgcttttcaataaggagaaagtctggttaatcttggaggggagaagaagagtagattacatgcagtgtggttcagagataaagaggagggaccagaggtgacctcagcttcactaatgaaaaacctatctgttcaggaaggatgaaacatcttccactgacattaaaggaaacaggctgagaggaatcaagataagatttgttgaagctgatttgagaaattctaatggtagaaccaaagtggaacgaacaagctaaatttttaaatggcgtgtgaggggacctccatgttacttttgcccagtcttgaaggggtgactgacttacgtgggtggatacctgcagcagtctcccgggcagaatggataacagatgcaaaagccctgagatgccatagccccaggtgtcaaaaataagagcagaaaacaaagggataatctcagagaattactggggaagtagaagaattctcacagtcccccgatgtagaaggtcttgtgttccttttgtaagaaattcagggttagttttacagatacgttttcaatgtaattctttgtataagggacagagggactgctgtcagtttgaatacaaaacagaaagttagttaagaatggtagccctctctttttgtctgtgcagccaaaacagtagtgctagcatactggacaggaggaggctgctgggggagtgcattgtgggtactgggctattactgtcaggtgctcttaggcatttccttgttgcattaaatggcattacctttattgagcaaaaaaggtagttttctgtttatgttttaactaagtatcttgacagctccagcctttccaaaaacagtggtttctttgggatgaaaagtttagggaaaaatgtagctccaagatctcacagaaaaacgtctatccttgacattagctgccctgtcagaagtgtttatccaatagacatcacctttttgtccatgttaggtcttctttctgctttttattttgcacttgactttttagtgcatttgctacatggtctgggttgtgcttccagctgcacagtcagtatgcttcgaaactccaaccacagcctggcctcttgttccctgaaggcatgatgccatcacctccaaaccactgtgaacagctaaaggacaatggcccttgcagtgaacatgacaaatgaagaatcacaaaaatattaataaaaattaataaagacttgcaaatatgttggagaatctcttcttgcctgctttgatatatatgtgtataaagatgtaatttgttttttcagatttgaagtcatagtatgaacaaatttagttttctttttttttcagttaaaacagtcttaagtattttcccataatcttatctctttccataaacttgcatgctgatgcagaatgtagataatgaatacaccactcgttcaatgatttttttttaccagcattggatatataattccttcaactgaaatacaccacaaataattatcctaatcttctacctaactttataatctttcatttaaattttgaccatataaagaaatgggaacaatgaatcaaatggtgtcagtattttaagactgaaataagttgtccaaccggcttccatgaaaggtgagccatttgcagtctcatccccacctttagagacgtcttatctcatctcctattaggatcacatattattcctaattcctcttttcttccgaccacactaaacaattgtttcgatttacagtataaatacaaatctaaaaccatttgttgacatttcccccaaatattgggaaatgtttgatatgtgaatttatttttaaaataattttgtatctctagtattttaagttaaaggggaaaaacaccagtctatgtgtctccaatgagattacgggagagtccccttaaaatacccagtgaagaacagggctcactcacgaaggaaagcatgcctttccatccttaggcgtctgtgataagtggttctgaacctggactgcagacctagaccacctgtctgtttccagaaagtctctattaacagatcagaagtaggacttgggcagctgtaagctttgaaagttccacaagtggtcctacagtctagtcagggttgaaaagtaattttctattagcttccaacagaagagaagtcggtcgttttgattttttttagctctctgcaacttcctcttaattggccaatgacaactttggatcctttcacctttcaattaccacttgacagtgtatgtgacagaagaggatgtcacttcaaagcatttctcttcttctaaagctactctggaagaaagcaattgtcgagtcagccccatttgctggtagtcataaacaacaaggtctcaaaggcagcccagtggatgtgtatgtgttgggctctatctctctatgagcactgagagcttcagggtccagtgtagccctaccagttgcatgtgcctattgagcaattaaaagctggccagtccaaattgacacatccttaaatataggagaaagtggaagactacctacaaaagtaaaactagttcatcaataattttatatttctcacatgttaaaatgaaatgatattttggaatcataagttaactaaacacattttaaaatctcacctgtttgtatacttaaaacagaaagtgcaactaccacagaattttaaattatgtataaagcatgtactagatgccctagaatggtgctagctagcatttccagtgagacaaatcaaatattttattttcacattattgtaaaattaatttaagggtctaaaattatatagcatacttagagacttaatataatcaatttttatcatagtatacacgtatgtcttcatcaacatagttgtcaccttgtgtatgactttcagaaatttcttctggagtactttctattctttaatgatgagatcacaccagaaacacagaaatgtgtttaatactaggacagaagtaataggacaaaggctagaggagcttccccagagaagggagaccagtgtgtgagaaggcgaaagggttagtctagagtaagccttcgaaagaagaagaaaggtcacactggaagaaagagattcctagaggcaaggctaagtagcttctaactgttggagggcatcatagaagagggactatgcatctctgtagacttcattttctttaagacaggctctcactacacagtcttagctggcctagaaggcactgtgtaaatcaagctggcttcaaacttacagagagctacttgtgtctgcctcctgactgctgagatgaagcctgtggacttccaaaagcagagctcagactaagaaacaaagtcaacaatgagggaaatttggagccagaataaggggggggggatttatcacagctttcactggaagaaataggctgattgaggaacagtgagaattttatatgtggaagtgatcaagcctaaatggagaattcatttagcatgaagttcttggaaaagaaatgttaagagctagatcttcccatttatagcatagtgttcaagagcatagactctgcaagtatagttctatatcttactatgttctgagtcctaactgataatgctaataaatgaggtgctttcaaagatgcctaaggtaaatgggactcatgggaggaagagaggagaaaaataagagggcagtgggctaaggagaagacatgctcaaagtaaatgatctaattcaagataatggccttatataatccagtattacatatttatataaacacttagtttgcaatgtacacaatatgttcagctagtgtaacggagactcatgtctgttttgtacaaaaagatttcttccatatcctattttcaatactctattactcatttagaaaaccgaatgaacatagtacaatcatgtatactgctgggctccacagactggacagccaatgcaggggagagtgctgccatcataggacttgtgacctccatagggacattgggaatgaacaatggacacacaacatgagtgggaaagtttaacaaatactgtaaagttatcatagcatgaagtgtcagaaaagagtcacatgcctcagaaggtctaaacccaaaaatgtgcaataggcaggatgttcaaaaatcatggggaaaaaattcatttgggtgtaggaagccactagataaactacctgggcaggccatactgaatggagcagccttgatgcagagtttgcggccacaggaagctgttagaggtgtggggagcagaagcaaaagtgggagagcaattttgggcagtcctgcaggagcagatgggctgaaacaattttttcccccgagtctagagcctccagatgagacttacatactttgcctcattttcgtttatattttggttctgattcaggaaccaaaattttcatttactacatatttagaaaagaaggattctaaataaatgctgttaattctggagaatgctctttttgcagagtagaattttgagacgaagctagtgaaattacttctccaaagtcacaataacagaatgataaccagagttggcatcatacaatcatttcaaataaactgacccacacacacacttacatactaagtgcttacagtaatagtcactgagtggagggaaagtatttctaggtgtgatttttaaatgaaagaaatgaacagaataaaaagaaacctgagtttcactgacatgaagttggcaaataaattccccaaaagacaaaatttgtgagacttgatgacactgtatttacctgctgaaaagcaatgctttggggctttcaaacagacatttattattgtcttctgctctacacaataagtgaataatgtcaggaccaatgaactcctgtgacttccaactcagagaagaaattctgtattgtggccattcctttgtccccttgagccggtatgagcaataggctacatctgagcacaacatgctatgctgtgcaccacagacaaagtgaagagccctgaaatggccagggacatagctcagcatatagggcttccctggcatgcacatgattccccgggggccatccccagcaatctatgtattacgatgactctaaagtcatcgtagtcagtagttctgagtgattaatctcctgacttgcagttatcatcacgacctcagaagctgtcagaaatgatttctgaaccccacccagacctgctgagtcaaaatcagagacaagacccagaaaagcacacattggcaaaccctgtagatgaaatgtttctacacctccagagaagctaggaaacattgatgaccatagagagacatacagggtcccccagtaaagcagaaagggacaagagccccagaagaaattgggagcatggaggagaggggggaaaggtagaagaaagaggaggggagaagaggaggggggaggagaacatgagggatcaggaagattgagtggagagaggaatagcaaaaagcaagaaaagagacacatcaatagagggagccactataggtttaaagagaaaatatagcactagggaattgtacagagattcacaaggatgaccccaactaggaacctaagcaatagtggagaggctaccttaaatgcccttcccctatgagaatgatgactgccttaaatgccaccctagagccttcatccagtagctgatggaagcagaagcagagatccacaaagcagtgagccagactcctggaattccatttcagagagggaggagtgacaaacaaaggggtcaagaccaggctgggaaaacccacagaaacagctgatctgaacaactgagaactcatggaccccagtctgacagctggggaaccaacataggcccaaacccaggcccctgaacatggatgtcagctaggagcactgggcagtctatgggcctctgggagtacaactaggatgtatccctagtgcacgaatggacttagggagcccatttcctatggagggatactctcttagcctagatacaaaggggaggtcctaggccctgccccaaatgacttgacagattttgatgattccctcatggaaggcctcaccctccctggggagtggatggggataagtagggggaggggtcggtgggggcatttaaggatgggagggagagggacctgggattgatatgtaaaataagattatttctaatttaaataaaatttatcaaaaataaataaattataattttatgagaaaaaaaaagaaaaaattgcccacactcaaatttaaggatcttttgctgcacatgtgagggagctaagaatccaagaaatcacgtgacttgctgagactaacctaactcggtgctaagcctgctccagtgcaaggcttgctgccttcctgtatttgcatccggaactggacttccttcctctctctgcaaaggcaaccagaaaagcccaggctggatccaatcaccatggctttttttgtctgtgctctctatcctacaacactgaaacacctgggctttttcctttctttttcgacagttgctggagtaagttgcttggaagctgcataaataatgagcaggcacagccagccctggttagtcacagctaagctttaaaaggggtttagaactatgcagcctgacctaatacagacacaacctgaataacattaaaaagaagaagaaagatggagtcccactatctattttcaaaaacatttacgtgattttaccttaaatgccagctttcttttgtttatgtttgtttcttttttttttaagaaatcagtcaatacaaaggtagtgcacacaaatagaaagatagttgcaaggctaggttaaaaatttagatgcctggttaatatttggtagctccaggccacagcggccctctgttttctttgctatgagatggtattacaaattcggtctcccagaaccagcgatctcgtcaccctagaactttgcctggcgtctcctttctgtggttgtgaatgtggccaaatgtgatacagttacccgaacgtttgcatgctgcttctggtgtgattgaaagtgtgtcttgtgtgcgggagagaaagcaaagaaagacttgtagaaaaagtgggcatgggagcgaaaccaacactggaaaatcagtcatcaaaacgaggcaagcactaattgcccggtctggccctctgtcatcttccctcctgtcccctctactcgcatccattttatcctcctaggcgctgaggctgcagcctggctggcctcttatgtaagtctgcaatcagatctggcatgcagtttgttttagcctgtcacagacacagggcactgcattgccctcaacaaggctgttcagcatagcatatgactgtaaatcttctttttcacgcaccacagtggggacctttgtcctagctgtgatttagcggcttttattagcctgagaatcagccagtgatcaggagacatttaaagtgagagcttgcccatttcaatgaggagagtccaaaagccacaagcgctttaagaagttacgattggtaggagagaaatgaaatcttcatgaatatgaatatatagtgtatgtgtgtgcctatactaaattaatcattgctcaaacatacccacatataatccaacaaaaactggaagtcacaactgtttaaatatttttaaatactctgcatttggcacgacctaaagcacagaggtctgtttaaatgagttttcagaagtatgcatttcggaaaagtacaggtcttagatggcagcgcactcctgcagtggccactactttaaattcacttgtgactccaattagggtcggcagcggctgcaaataagaaggaatgatgttcattccactacttgcgtattctgcaaatgctttctggacgtggcagtttgcatatgatgtcagcgtgggaaaataagaaggtattagcatctgtaagaccagccggaatttctcagaggtcccctccacaagctgactccacaattcaggctgtatttccatttttaaaatgtatcatgacagcatttttttactcgttcaagtcatgaagtaatgatgtctatctgtgtattcaaagggtttgattcattttccataagaccaagtggtttttgtgttttgctagaaatctgtggtcttgctgctttctgccgctgtagtttttgaacgtataaaatatgtcctgtcaagaatttccatgcattcaaccaccagtgcaaaagcctgtggttggaataatttctgtctgtttctgaccatcgtaggaaaacggaagcattaggtgattttaattcattttgcttttcacatatttattggcatgtcattgcggaagcacaggaacctctgctgtaggtctaggcaccccctgggcaagtgaagagtgtcagatgacgctaaaagagcaaactgagcctttcaaaagaaagcttggcttttaaaatgtagcataaatgatcttatctcgaaagcaaagagtttgagcctcattcacaatgagctggagttaagcaaccaaagaaaagtggagccacgtccgtttatctgaggattgggcaccatccacagcgaccccacagatcatagggaaacaaagcccaccttggcttgcattatctgatgctataggctgtcttatatttcgcagataattgcaccacacactgtcttgctctgctaggtcataacaactggctgatctgccatgagataaatagcatacacataccataaaaaaatttttttttctatcgtgaaagtcattcctttaaaggtattcccttatccactgaagcacacactctgtgtgctggggagtgggttgcaaggtagggaagggtagaaaacgagaatctgataatggagctgaacggggccatagagatatttctcgatatctggtgctcttgctgccgaaataataactgaagcccagaaactttgtgactctttacaggcgacctgttaacggcagctccagagatgcattctggatgtcttcactctttgttgattgtttccatttctgctgtgaatacttgctcacaaagtagacactgtcctttgccttgccattattgattgcgcattttcttctatctgctacaactctccctctccttagttattgtttaagaacaaactcattgcccatgtcagccagaaaactcaaagttgatgtatccccagccctgttaccaagttgaatcttagtctgtaaggctcaaaataacctctcttcttgcctggggttggtctgaaaaacaactttagtctaatcaccacacggtattctctcactagaaggactgtattccatacttgggaggaaagctctcttgcccttccaacagtctgactaaggagcaggtggcctctgttgttaccccagcacagaccttgaagcaatacagaagcaaacttaaggaactagctcctacacattggagagtgccagagaatggcttgagtcttactggtactgtgcctgagactcttttctgcctctgggtgtttttaaggagttaatgcagctaaatgatttgtctagtttgagtcagggatcttgttgaaattaaaaatatcccacctgatacacctaaagtgcttagatatacagcatgagcatatatgtgatctgaagtaggacatgattttattctgacacaaagtctcactgtcattgtgaaaatgactctctgcaaccttggctttaattgtggcaatggctgagaattatttgcaacatgcaagttaccaaacgcaagttactaaaattaaattgttcagaatctcagcatacaaaggaacaaaccaaaccacaggagctaaaattctgtttcttttgaggtttgtttgattgttgtggtggtggttgtttgctgtctggctgactggcttgtttcttgagtgaggatttcttctctctctctctttttttttttggttttcgagacaaggtttctctgtgtagctggagaccaggctggcctcgaactcacagagatctgcctgcctctgcctcctgagtgctgggattaaaggtgtgcgccaccaacgccccaagtgaggatttcattatgtagtctgggctaaacttaacctcttggtcctctatcgacacctcctgaactctggaattacaggtgtgtgttatcacacccagacagcttgccttcactaataaagaaaaagcatctcattttatttatttccagttacccatattaagcacatttattagttcatgttatatttttctgtaaactaaaaacctgctaataacttaggatgtgatgactaattactacatgaaatttagaaagtatctgaataagaaggaaagttgaccatagcttgtcacaattccaccttatagaataaacatttggtgtcagatgattaaatatgcttttccattcatgagcatatgttgtcattaatatttacatgctcagtgtttttaaaacaattgtgattttgacataacatgaacatcttgattgtagtagcacactaggtacagtatccccagagcaatccttccttctctggctgctcttcagggtactgactccagcttgtgagtgtaagcaggagtggtgagtgggagtttggcaatggtgttattgttcattgagaatatgtggtcatcatgttagtgactctgaactacactgactacttctaccagtcttcctttctctctctacctgttgccctaggtctcataatccctttaagactaaatcggcagacacttaataaaagaactcataaaacaattatgtatgattaattaaagatgattaatttgggtaggtgatgtttttatttatctccaagttttcataataaaattaaaaatagacatgcatgctgactttctaactccacaaatcaaaggtactatttgtcaaatactataatccccaactcagtagtcactcaagtacaggtacttggagtctggtaggaagtagctctacaagtttatctgggattcgggatttcctctctattggagagatgtgcacagtgtgaaagaataagaatggatgctgaggagtagaggagagaataatgagcctcacttctccttgggagcttttttcaccttacataatattgtcttacataagccccagcactggttatttgccagctatcctgggattttagcttcagaaagatcttagctcttgtctgctaaaataaaaatccccctcagagagcattcattaaaagcagacacgtgtacatgggcattgttagcaacaattataaaatcaaaattctagagagagtgtgactgacccatttaattaacaatcaaatgtcttttactgaagcaccattgtccactttaaataccataattggtagcactaatttgtcaatgtataggatctgatgggtcccatggattttccaggcagaactgagacaaaagatttctttaaagtgtatttctttatacatctgtgtcctttctctgtggcactggggatcaaacccagagactagatgagtaggtggcactcaggaggcagaggcaggaagatctcagcctggtatacatagtgagtcccagaacaaaccagagctacatgatgagaccctgtctcaaaaaagaaaacaacaacaacacaaacaaacaaacaaaaaagccagagatacatatgtgctaaagaagcatcctccactgagcaacatctccagcccctatttgtgtcctcttggcaaatatttttatcttctgtactaaaatgcctttcaggaggcagagtgaggtagagtgagcctcccaaaagcgtctcccaaactccaagataaagaaactactggaagaagacagctcagggctagctgcaccttccagaaagtgcaactaagacttgcattatgtggggttatagggtgacaacctgaccctggcccaggaaagccactcccaataacctcatctactttactcctttgctggactttatgtctctgtgagttacttttctttttaatatagctagagtttcacctttggctttgcacattattgatggagctagacattttatgaagtgtaaaagcaaatccagatatttcagactggattataaaacttgcaaagccaagacctttgggttctaaagttcactgaggctagatgggatagcaatagtaatattctggttttctatgacatttccctaccaatgagatgaatacaccttgatagtaacactgaaatattcataacacttccatccatgagatggatggaatactgttatccttctttgtttatgaagacaccagcacctgcttctttgaaaagtattgtaaaaagtcatagaaaatgtgtgtgagttgggacagtcaacatattttaaatatgtagggatactaaggaataatctaaaagtgtcttgcaaatgtcatacattctaaatcatcttcaaaatcctccaagctactgggtcataataaaaatggtgttcccgccaacaatcaacttcccttctgttcctatatcaaaaaaaaaagagctgcattcattcttctacaaattcccagtggacagaaaaaggcagaagaaatattagaagcaaattgtagcaacacagacctctggcttgctggagtcagcacagaggcttctccagaggcgagaaatgagcgaatagagcccaacaacatgcacctccagctcttgttctatatattaatcaaaacaagtactgaaataatagaataaatattcaataaagtactgaatttctttaaaagacattcaaaataaatcttattgtttataactgacataagcatactatcataagattatcatttgatatttatcttactattgactgaatatgagtttaaatttttaacccttttagttgactacaaaataacattttttaacttaatatgatgtattcctcttcaaaattggaaatattcaagctagaattattataatctcactagggaattaatcctaaacaatattttttattttgaaaacaatgaagagtggcaagaaggtgcaaaaataatgcaggagttttacagatatgcattatccaactttcttcaacaatagagcactttgatcaaaaccagtaagttgtcattgatacagtattcctactctaccgaccttatttgcacttcactagttattcctttattgcttgttttctcttacagagtctgatacagaaccccacactgcatttagttgatgagattagatatccttaattcatgagattagatgtcttcttcttgcctttcatggctgcagtcctgttgatgagtattgatcagacattatagaagatgccacacaactcaggttggctttggttttatgtgttctcatgaagaaatgaataatatgcatcttgagccaaaataacagaagaggcatgttccatggttttctaatgcactctatcagggatgctgtgtgttaataatatgtcacactgctgatggatcttgcctgaatatttgctcacagtggagcatccatataactaataattttgcatctgttgcctgtaagttagtaaacacttttatatctaagatgctgcatatttgagtctatgattctattttattccctatcatatgaaagatgtggtttctattctcttgtagttagacaaaaagtcatgcattttttacagcaatgagtcttgggagagagctttgtacacaggagtgatcagggcaatgcaacaaaaaaagaaaatagagaactgaggcactcagagccagctatagaggagggaggtgacctcagtcatgtctgtggctaactagaaccttagaagatataaggaggaactgagcaaaacatcacaggagaatggatatggagtaaatgctttccaatggctgcctacaaggagccagaagtcatggaacacagcacagcagctcataaatgccagtcaccagaagaccaaagcaagacaaatacaaaaccaatgatggactcagtaggtcaatagagaacagcttctacaaaagttaatagtgttatttgcatccttcatcttctattacggcacaccttccacctgtaacatgtaacttaactcccaaaacaaaaactctacacaatgaatcagaaaacctggatttaattattagtttccattcctttgtcacatcaccttgggacatacacttgagtttctgcaatgacagtatcccaacatatccatctcctttatggtatagttgcaacgattactatcatggttcagaatgggtatggagccacacagtcagcaactcatgagatgagagtaaaagtaaatgaagaataatgacttgtgtttacaattcacatatgatgtcagaatgtctctttattagaattgtttaagaaagccattttcttgtgtggtgttgcttggcgggggccagggtctccttcagttctgcttctgatgaagagaaaagtcatacctgcttgttacttacaagttaccattttctaccatttgggaacattttttaaaaaattataactgttttcactgttttatctctgctagtattttccttaatcctttgattgattttgaccaatcatgactcataacaatcagtaaaaacacactagtggaaagtatatagaatgtatataaacatggttcttatatgtcttatttaaaaaaatacatcctctactaggattccaaggaattgaggaatgataaggttttcattactttttaaaatttaataggatcagacagcaatgtcattctgagccttaatgggatctcagttccagaaaccttaaaaaatcatatagagtccaggagatgagttttacactggtggcactgagaaagtgtgtgtttagggtttggttggttggctggttggttggttggttggttggttggttggttggttggttgttttaatgtggtgacagttcagtggtagagtcttcttgaaggtgcaaggtcttgagtcaatcctcaaaagaaaaaaaaaaaaaaaactatgaaaaaccttctgagctaagccctgtgactcatgcctataatcccagtgctcaggaggctgtggaaggaggactatgggtcagaggccagattagactgtatagagagaccctggagaacaggtgtcgagggactttgtgacctacagaaaacattcataacatctttctctttatatactcaatgtgaattgacataatgtgggttcagcagcatctctgagcagtggtgactacaagcgatgtctttaacattagtatatttgagaaagggatgcacatttaaatgtctcattggataatgaatctgtttcagtggtggtttctatctagtgtttctacctagtacacagaactggtttctacctagtacagagaacctaatgacatgaataccatactaagttaactcttagctggaaagacccaatcattagaagatgcactgcaatttcgggaggtagctccctgtgcacaatacatttatttacaaatgtgtatgggcaaatctattgtatgataacttctccttctttggcttaacattcagttccctctggtagactatgaatgtctgagacaaattcacataaaacagtgggttgaataaaatcacataaaatgatggatttggtcactgctcactgccagagcttggtgcctgatatcaacatcagacttttttgtaagtattcttaccttgcagattggcattgttttgcttatttttcaagatgttctacttggcattgaggtatatgactctcaactgttaaatatagaatgtaaggttaggaggaatattaactttacatttttgcaaaaactaggatgtagccaactgtctgtttttaaaaatgactgttttaaaatcatgttcgagttcatgagttcttacctgtgcctttcttcttgtgtgctggcacacaagtcctttgggttctatgtagttctgtggatgtttgttcaagtgagatttcttggtttcttagtcttcctgtgtctgagccttagtcacagcctctctccagtctggcatatgaacatcagaactgcctaattccaatagaactgtcctgattaaagataagtgctctttgaacaagatgctctgatgatctccaatcctaaaattttctgtttaaaaaaatatgtaaaaaagcatcatatgtggaagcttgctctcacagactgtcgaagggttagtaaaagaccatagtcatttatgtacaattctgcttccccctcctctgtcatttgccatctatgatctcctctaatgatgaaaggataaatggggagataacaaaatccaagaccaggaaatcagttagacagaatatgcccttttattaacacctttttaaaagatctttctcaacactcaactcttgcagctttctggaatctcacttcttaatattagaactacagaataattctgtttcatatagtcattggaaaaatacaatacatgtaaatgactcactatatccattgctttctgtttatagtagtgttagttttatttttctaaactattgctatcaatagttttatgtttgtacaggggttctttatatctcttccccaaatcaatccttcactaagttggtttaggcagtggataagatacagatacaagaataataatcaaattataccagggaagacccaatcattcctaccatcaagccatactgatcataaggatgtttcttttgctaccaaatatattccaagcaaaactctgagatatgtgggaattttattgttgttgttttgtttttggtcttcaggggcccaccatccaactcccaaataaatacacagagacgtattcttacttatgaatgcccatacttaccctggcttgtttctagccagcttttctaacttaaattatcccattcctccttatatttcacctctgggctttttacctgtattctatatgtctttctttccttcttactctgtggctggctgtgtgactatgtggctggcccctggtatcctcctttccttcttcttttcttgctccttccctttgctagagcctagatttctcctatttattctctctgcctggcagccccgactattcctctcctgcctagctactggctgttcagctctttttaagtcaatcgggtgttttaggcaggtagagtaacacagcttcacagagttaaatgtcgcgtgcgcgcgcacacacacacaagactgagagacttgatattggggttcaagcttcaaggtgaagatcagagaagcaaagcagtcaagccactgcctcttatctctacctcaggctaaaagggcatgtcctgtctccacgagctctccccaagtctcagactgctgcctctcctcagcatggctggagaatcctgagcctgactactaaagaccctgctcctatcttttatatctctctggttctgggattaaaggcatgagcactgttactcttttagactgattcaatctcatgtagccctggatgaccttgaactcagagagattcatctatctttgtctcctgagtcttgggattaaaggggtgtaccaccactgcctgatctctatagcttgaggctgactttgctttctgaatcttcaggcaagccttaataaatcataaataatttatcaccacagttaaacaaatgcaacctaaaagaatgtaacatttttgcattgttaagcaaatattccacagcataaacaaacatagcatatcttaaactaatattccacaacagagataacccagaaatttctgcttaacggagcttgatctattgcttgtttccaatgcccaaaagctatcactttcccacctcttttaggcaaggatcatcctctattagaagagaccctttaatctaactaaagcccaaagaactgcaaacaaaaatggagatggacttgagacaagactgactcagacattctcactgtcttctctgtccttcagctctcatcatccaggaaaagtagaggacttcagaacacctaattaatggcaagggtagaaaaattatgttgcccaagtcgggattcacagaaacaggaaaaagataatgtggggaaacatagttgtggttggcatcctctcctccagcacagtgattcatgtgaaatgtccattcattctaaaacttgcttccagccacaggaaagcagtaccttttctgaagtctaaagccccagaagtcgtagtttcaacacagcacattccttgcctgaatgcgggagtgagttgtgcttgccttaaagactttggaaatacccatgtgagttttagcaaaagaaaactcattgtgacaattacagagcaaacaacaagtctctggtaccttgccacagtgccttaaggccaggttttatttttatttttatttttatagctcagggttttgtatatgtttattgattgtcaatttgtgatataaacaggcatgccctcttaattactagtctgtcaggcccagttcttccttttcctcaatatcccaaacattgttcaggtattccaaatcttcatgacatctttcgcatgttaaaagggtacagttttgctgagcaaaagaaagtaaaattcaacactggatagcacttgccagttcagcgtcccttaagtgaaaaatagtctttgtctacactggcctgcagcatctgaaacagaaccctctcctgcaataaaaaataaaaaagtaaatttaggtcatttctcattgatagtggggccaccaacgttaagaaaatgaatgtgattatgagagtggagagtgtactcaccgcttgttttctcaagaacataaactagaaagatgtctttaaaatgttcagtaacgtgaatcaccacctagagagaaaggaacacttaaatatctaaacctgaagttgcatttattattttaagtaaaagcatctattaaaacatttacaacttccttgggatgtagtgtcacatttctataggatgtttttatcacctaccaaatattaaatgatcacacactcatttaaagcctcattgcaagaaatcctctcttctgaacatatgtgatgtatcctagctgggcatgtcactctgaatgtactagtgtggatgctcttaggctaaacaagttgtttcgggaatgaatatcaacggtgaagaggagattgtgtaaataaagcaggaatcaaactactctgtcacaatgcacaaattaattaattgataataataaaaatgaaactattttatgtaagaccaattttgagaaagtcattagtacaatggaatatttttatctttcaagcttttcctataagcttttcagttgttgtgatatgcagaagcactttttacaaaaaaaaatatatcatttaaagatctgaatgtgtgtatgcatgaagaaattacacagcatattttacagctgaatttttcattgttgtgaccaaataactaacaaaaggtgacttcctggaggaatgactgattgaggctcacagtttgtgactattggtcatgacttcaaggaacatgtgtggataggaatgactcaaggctgtggaagtgagagcctggtcacttctagatggattgataagcaaagcagagggatactgtgctcaactccctttttccttgtccctgtcgtgcagtccaggaccctagcctatgggatggttcaggtgctattcaggatagatcttttatcatcaggtgaacctcaagtgacccagacaggcatgcccagaggtatttctcctgagcaattctaaatccagaaggttgacactgatatataaccagctcaccattcatagcaaaatgtgtttaaaatgggaggggggataggatttgctaatgttcattataatgacagtttacaaagtgaggtccattcagttggtcacataaaagtcaataactgtgttcagcttattttttgatgactagagacaatgctaatacacaggtttggtggttcacgatgaaacagcaatgggaggaccagccagaagctcttgccaaagacgttctgagtgccactgtcacaaacccactaaagcaacttgaggatatcaaaacaatctgaaaaattaagaaattttaatatctgtttgtaaatcccttaaagtactcagaaaaataaaaatagaaaattatatgctttccacaaactgactaccctgtaaataacagtttagatgcaagtttctcttccttgtctacatcagtaagtcagacttcaggcatgcccagttggagattgagctgtgtgttctcactaccaagtatttgtaaatgtaaatttattttattccgtgttttttatctaattagagtacaagattacatctttttaaaaaatgaagatacccttcccctcccatgttcctttcttttcaacccaaaggaaaatgtatttaacacacagtgagaagcagtgggtgagacatcaatgccaggtacggcagtacacaccacacacacacacacacacacacacacacacacacacacacacacacctagttggaactaactataaaaacctcagttaatattactaatcaaactatactaatcttataacactaaaataacttctaaaatcttcctgggaatgatagaaaataaccaacacaattttttaaaaagccttataaagcaggtttgtgctttgctttttgttttccatttttttattttggatttgagaaagatcttgttaaaactgcccttaaattcactatgtagactatctagccaaaaatgaccttgaactccagtctctccttccttgacctccctggagtgtctccatcaatatttgccagttggattccatgccctctgtctttgcattatttgtgtcattacataccattatttgttaaattaatagaatgttgcatgcagggtatattgctgaatatataaatgaatatgcatttgtcatctttgatgtatttaatttggctgatgcacccataaaaaaagcctgcagcatatttgcataattaagcataatattatgataaaccatttcaagagaaaaatttggtctttcaatcacattgtggttatatttttacccttgcatgttcagaattcatctgtgatgagaactggaggtagaaaagattggcttggtctctatgaataaggatgaaaagtttccttgaattaatggttagatgggccaaactagaacccaaatattagacatgactggcataatctagaggacaagaatatcttcttcaaatgtcacataggaaaagaattctaggggctagacggttgtatcagcaattaagcttccttgttattgccaaggacccggttcaattcccagcacccacatggaggctttgccaattcccagcacccacatggaggctttgccaccttctcaggtaccaggcatgcatggggtgcataagcatacatgcaggcagaacactcatgtgcataaaataataaaaatgaatctaaaaagattaccaaaagaaaagaattctagactgtggcattcactgagactaaaacttctatagttcacatctgtgtatgtgagtgtatgtgtgtgttataaaggtttctgcatcttcaactcaacccgggacccagaaaatagttttcaatacccatttttcatgaatcttcattttccctccaaattatatgagatgacacatgtgaagatcaacaagcaagtgaaccatttgaaagacccactttttgattttattactgatttttattttgttattaactttttatacacttctaattgtgagagtttagaaaatcatactgtagttatcaaatcattagaaaaaagtcagcaagccagtaccagtttctcatttgtttaataaatacagcaagaagtcattaacaaaactcataacaatttaacctatagcaaagattaatgtatgcgttagtcttgtccccaaggccctcggtttactgatgtagttattggtgacatcatgtggttgatgttggtatcgacagcaaagttaggccatttcctaaagctggttgaattactgtcagaaaaataaaagattttaaagctatattgtttcaattaaatttgaaacaaagaattttcgctgttccagaacaaatcatttctccccttcatttcagaatttcttagatcatcatggtatatgaataagttatagttgtatagatagacaacacagagggcagtaatttctactcaagtacctgtcactttccagataaaaagcaatactcttaaatgccagaaatgggcttatttgttctgctcaatagagtgtagaattttctattcgctgcctcaagtaattacttgggaaatgttttcattgttaaaagctaaattaacagcttttatcttatttatttgtgataatttagttaaatattgtccttgctagaaaaaaatgtactaatccctacaattaagaagtgttttatcatatcccctttttcaagaaaaagaaaagttcaggcaattaagcaattcatctttaactttgaccttagttatttacttaagggtgccagtgcctaatatggtaacttgctcctctgtagtgtcagggtcgtattcctgtcatttgataaaatgggacactttagtcattaatctaatagccttgtgatgcaggaaggaagacatgattgtgaagggcaggactactgagccacactcttcacagaatcaaggcaatgaatcccttggtggacaggctggtggatttccaactctgcactctctctctcctgcccataaatcttacctgttctccaacttaaattatactgcatagaacagagccctctggggacttccttttccttacctagaaaatgacgtcttcactctaacatatcactaaatgagatatcaatttgcaacttttgccagggtttagtcaaagcaggctccccagagggtctcctattatagtaccccgaggtactaaatgaaaagccttcagtttctcttctttaaaatccaggctgctgaactcagtgtgatgggaaaccatacacaacatgtatttataaaagaaatggtcactgatcttaaaggaaaataagaatgataagtactggaagacttaaagaaaacatggtcaattatgtcttaataccaaagtcacaggaaatacaatttctattgaattttcacatatcccaaagaatgcccaagaatgaactcttttcctgagcacagatgctggggagtctgggagtgagcctggcactgcagagcaggctatttttggaaggagccaagacctgcaattgcctctcgtggagaaagatgtaccactatgatagctggttattgaactgggggcattggcaattgatgaggtgatggtatcacccttgaagtgcaggtcacaggaggaaaaagggtgctcctgagggtaatgagatacaaacacagcagagccacactgccattgccttcagcttaattgaacccagtaaggaaaaaaagaaaaaagaaaagaaaaacttggaatatgtttccttctacactccaggccagtcacgggaccaattagctaaattcagctgaaatcccctttttcctcaataggttttacttaattacttcatgtttcctcatccaggtgtaacatgacaatgtatgttaaaacgagtcccaatgcatcttgcgaaatatgttcccagtttcccctcgtgtgaagcaacaaaggagaatgtgtggaaattgcctcttggagggctgttcaaaaattagcaaacttgctgaattcaagaggttaattttcacccttcagagccttttaattgtggatcacagagatctcagctcttctattcaattattttggtaattcggtcaagtgcctcattttcccaatctataaaatatggaagaatgtgaatgtaacacaaacatcacacttctttctctcactgaaaaggctctattggtctccctttgtgaaaacagaagtatggcatggcccactttgggcaattaatcaactggtacatcttgtgaagaatttgaatgtgtctgtcagtgttctgaagggcttccttatcagacactgactggcaatcagccacttggaaatgtcactcatacaagtggagttccctaccctatttgtctcaacctcagagatgacttgtgtgccttgatatttcctagagaatgcagggagccattgcgttacccaagtgccatgtgactaccatcatccaaaggttgaatttttgctgctagaaaaacctgggcctaacgagcagagcacacagtgtcaggatgttattggtgtgctctgtgtgactgtaacagtgttgacgtgaaatcaaattcaattagcacagacttgctaatgacctgcactgcttcaaaaacacacaaggacaaaacacttggccaaaaagctcccatttaccagagttcccaactccttttggttgtttgttagtgcaatagccaactgccagattgtctccatagatgcctgctaacgcactgcactaatgaaacacttgaccacgcctgtgtgtgatgaaaggaaggggcgggggagttctgtccttaggtgctcttgaagcagtttctgaagccactgtggagcacacactgcgtctctggagaatacattggctggacagggtatcaaagcagctaggggaaataaggtctgtggtcaggatcgtgtttcagtaaagctagaggcaccctcacagaacgtgcaggaggccagcccatgatcccagcagcactttaaagaaacagaggagcctttatgatgtcccgccatgccaggaagatgaagacgatgtccgttcttgatttctacagctttgattgactgcctccctgttgtttctttcttggtcgcctggcgggctcattataacaccctctgtctcccagcaaagagcaaggacagctctgattcacctgccctcctctgtcccaccagcaaagagaccctgcactgagtcactctctgggattctctgtaaacacagcagtagctaataacgtgtaacgtttaaagtgccttattcgaccatgttgtttctcatgttaacacctcatggtttccttccatgcttagcctcaaactttcttctctcttgtatcgtgtagacattttttcttaatatcgcattctttatcaaataagtccttaaaggcacttgtgtaaagttttagcattaaagagctccaaaaaaggaaattcaggtacctgggataaatttgcctattcctatattctaagcatttaccatcatttcttcaaagtcttgccaagtcactgtaaaatgccaaagcctccccaagtcagggtcagcacaacttcaacttcctaaatcttttacatcataaacccagaagtttaaaacaccatgaaaaagccctgaactggcaatatacaacttagacttcaagttaataatgataggattgtgataatgatgactaagaagaaattcaaaaatgctatggacttctgtgcttataaacacaaaagaaaaactcaacaggggaaatgccctagaaagaagctctattcacgtacaggaggctctgcctcatgcgtgcagccatgctaccaaattcacatgaaacttaggcctggcattgttcaacagcaaagaagtatttactcaagaggaacacggaggcaaatgaatataaggaattaatactactctcagactcttgcaaacacttgaacacacttggttgactcatggcaaaaataaaaagcagatttaaattctaaactattactgaaagaaaaagaagaaaatgccttttaatgttaacaatgacaagatttgtttcttgtgcctcaattctagaggaatcatttgttcactctgccaagccctgtagagaggaattattcctcttgctttccaaatgagaaaactgggtcttagctccagtgatggctccatgattgctctgaagaaatttcagttaggagaagagctccaaggacaggaggaaggtgggtagcccattgaagatctgtgtttacttagaggacacattcttcacccatttgacatgacttagctcagccaatctcttcaccacagaagctgcacaggtttcctggagtttgcccaagctatggaggaaatgctggcacttggacactttggacatgccagctgactgcataggctctgctgttatggatagcctacaagactgtctatacttacagcctgggcatcctcatccaaaaatctgaaatctgagaggctctgaaatacaaaagttttttacaggatttctctgtgtggctttggagcctatcctggcactcgctctggagaccaggctggcctcaaactcacagagatctgcctgcctctgcctctgcctcccgagtgctgggattaaaggcgtgcgccaccaatgcacagcaatacaaaagttttttgagtaccatcctgatatcaaaaataggtatttccatacctagcctcctacaatgaaattactgtgaaaacacaggtacaaatatgcttgaaggatgccttaagttaatatgcataaggtgtatatgaagtatgaattaactttgtgtgtaggcttcagtcccttccttggtacaactcaacatacctgggcaaatattccaagattaaaaaaataacactctgaaatccaagtgctttctgatcccaagcatttttgaagaaggaactctgagcctggagagacattttttctctttcaatgctccaaaaaagaagtgtatatatgaggacactcactcaggaacagttcatctcaaaaggccctgctgttgaagatctgacttccacagctcaagagacagaaaacagttgtagcttctcttcccttagagatttacctcaaactcttgtgttgattaaaagtcagaagggtgggggaataaagaatgttctacctactgaatggcactgggaatattatactccacagagaaggaaggacaaattgaacacaaaactgtgtgaagatcaaattaaataacaaatgtacaagccctttataaatgacagagccctgtgaattttagtactgcagataataacatcacataagattcctttgcccttctccttaataaaacattggtttcttcaaggtccctagaagccaaaccaaaggagtgtgtttccagagaaatgaaatgtaaaggtaattgtgggtgttcaataaatattaaacagcctcactatttgggggatgtttcaagtatgtgattaagttgcgggtgacagtaaaggaaaccagagtgatctttaattataaaatacctgttgggtttggttccagtataaggcaattaattaccttgaggctgctagatatatctttctcacgagagttatgttctcacatgaaagcctttgtggacgcacattaaacttcattgtttggactttcttcatgggccctacctcctttctgtagcagttaatcaccattagctagccaagccttgcaggaaatcttagttgggagacatcacagaagtgggggaaaaggcaatggtggcaggctacggcattaaccaagtttagacaaacttgtaaagaacctgaagggaattcaggatctccaggggacaaaggaaggctgtaggaggaggaaatggaattgtccttgttggtgtcatgatattgtaatgcaaacatgttttttaagtccagcaagaaaatctttgggtttcattttagaaaactgtccacctagttatatagcttcttcttttttttttttttttccgagacagggtttctctgtgtagctttagagcctattctggcactggctctggagaccaggctggcctcgaactcacagagatctacctgcctctactcccgtgtgctgggattaaaggcgtgtgccaccaaagcctggcacataacttcctttttaactgatttttttttaaaaccagtatctttgaacctatgagtggaagtaactggtgagctaaggaaatgtaattttgaaagtctcatgctgtcagggttccaaaagccttttattaagattactcctatgaaataataatagctgaggcacttaagtgagcaccatgtgccactggcaagtgcttcacgtgtgaactcaattcatttccataatgaaatcatggggaaactgaagcaatatggtactaattagcttgtccatgaccacagggtttcttgtctggacagcctacacgtggaatcctttcgatttgtgtctatgtgaccatgagaaggactgcatgcatgcatatttacatattctgtttaaaccctggttttaagaaagactgcattgtgtatcttcttatgaaccaaagcaagtgaacttcaatgttgttcttttctttctgttctctagtttatttctgaacaatttgttctataaccagggtttagtttctgtgtctataatcagtatcagactggttctgtagacaggggcctttaaacaataaacttgacaacatcccatcattttccaaactatctctgctttaatttatagtaaaagatgaagtgtagagtgactgttggtttacttgcaggaatccatatttccgtttgttttgcctcaccctaaattttctcaagtcagcaagactaaagggcatggttcttcaaatggaaaatgtagtcaatgggaaacacagtgtgtgtctctgtgtgtgtgtgtgtgtgtgtttgtgtgtgtgtgtgtgtgtgtgtgtgtgtgtgtgtgtgtgtgtgtttccttgtaaaaagaaagaaagagactatgcgctatattcagctgcaaggagaacgctacatgaactttaaagtcaagagtaaaacacagcttagagaaagcttgtagaggggaacacatgctcaaggtataaagtcaaattggaaagatacacaggaaccttagagaccagattgtcccatctctcctgctgaatgactttcactgagaaatggtgtaaaatgaaggcaacatcaatggaggtttgttgtgacaactgaataatgagaaccctataaaatcccagacacaagctagctgactggttatgtatttaattaatcattatttctttaatttttgtcccaaagtataaggaaaacattgggacaacctttaaagatacacaacagctcctagaatgcaactagaagaacttaatgaaagccaaaatactctcttccctagtcagacaaggtattaatcggcatgtaactgtcttggttagggtttctgttgctgtgataaaacaccatgaacaaaagcaccttgagaaagggcaggtttgtttcattttgcaatgctcagatcaaaattcttcactgagggaagtcaaggcaggaactcaaggcagaaacctggaggcaggaactgaagaaggggaacactgcttagtggctttgctcctcaaggcttgcccaacctgctttcctttagcaaccaggaatatctgcccagggctggcaccacccacagagagctgagccctcccacatcaatcatcaatcaagaaaatgccctacagacttgccctcaggtcagtctgacaggggcattttctcatttgaggttccctcttcccaaatgatgctagcttgtgtcataaaactagccagtacagcaacttatcatgcagataagtaaactgagaaccaaaagtaggtcgttagcttagtgtcctaagatatctaccaagtgatggtgataagacaggaacttggcttcctttaggaaggaaaacctgctacctttctttggactgaaagtcttaggccagtaggggtcagccaagagtattccttggtacaaataaccttgtttttaatcaccaccagaatcctaaaaggaaacaaaggacagaacattctcagattagagctggtcatcacatctcagaaaaagaaagcaatgattgctaacagagttattaagatccagattgaaactattcctgtggacagtccatctgtcacactgtgttgtttagcaaagtaccttccaatcatctttggctctcttagctcaatagacagcttccttttgcaatgttttagtgaccagagatcatttcatgtaggagagtgttcaaaaaggcatagaagtatgtcagtcatctttccatcaccataatagaatgcctgctatagttaatttatgaagaggaaagggctgagttcatggatttagagattggagcacagaataaggcagatttcctgccttgaactttgatcaggattccagtggcaacatatatatatatatatatatatatatatatatatatatatatatggtgaagcaaactgttcctttgtggatagaaagaaaaagggaggaggaggaagcaggggaaggcagagttttcctccccctctccaggaatacacagtagctaaggacttcccaccaggcgccacctcccaaaggctccacaacctgctgatggcatcacacagaggacaatgctgccaacttgtgggcctttgggacacattcgatatacaaactattgaagaaagcatttatttagaaagaatgagatttggaaatggcacagatgttgtgtgccttaacaagagtatgactagagggatggagatgacatcagctagctaagataaactccctgtgacaacaaagtctccaatatagacctaagaaatacctacatgtttttctatggcaatctgttatgctggtgttatcatgcctagattagcatgaatattctagaaagtgaagctcttctgatgggcttgccatgtaaatgggatctggaatctcaattctgagcatcaacccaacaaataatctaaagtgcaggctgaagaaatgccacaagaactatcacttctcacccatcactttgtctccccttcactctgtaatcatatgttaaagaatatgctacttgtgtgatgggaataaagtacaccaacatggatccatcaagaagagcagattagcagctaaagatagcggtatatgcatgcagcccagacaacttgccaaaatgagcccagtgaaatgtcagatactgagttcactggtgggtcacaatggcatagcctcacctagaagtctctgtgacacttagattaaattgtgttcccattactttgactgctaagggagcacacctacaaagacaaaagtagtagagaggaaaatttctctggaagtctacaaatgagagaaggctgtgattcatatagaatcgccaccgaacaccctgaagaaaagatttgtcccatcatgctgtgaggagaatccagaagctaagatagggaggcagtctgacttctctctactcaggcctcaatctcaagttgttctataccctggatacactgggagctcaggaccaaacttctccatgcccctgaatcgaaatgatatatttgaaagtttctctcttccttcacaaaatccaaaatgcatcagtgctttgagaatctttatttttttagattgtgtttgtttctcttttttataatgaattgtatttaaattagaaacaatcttactttacatatcaatactagttccctctccctcccatcatcccattccccccaccaacccccccatccactccccagggagagtgaggcctttcatgagggatcatcaaaatctgtcaagtcattaggggcagggtctatgccctcctccatgtatctaggctaagaaatgttcatgcactaggaatacattcagattccactgtcagaggcccatagactgcctagtcctcctagttgacattcacattcagggggcctggtttggtcttatgatggttccccagctatcagactggagtccatgagtttccacttgctcaggtcagctgtttctgtgggttttcccagcctggtcttgacccctttgatcatcactcctccgtctctacaactggattccaagagtttggctcagtgcttaggtgtggatcactgcttctgcttccatcagctactggatgaaggctttaggatggcatttaaggcagtcatcattctcataggggatgggcatttaaggtagcctctccactattgcttaggttcctagttggggtcatccttgtggatctctgtacaattccctagtgctatatttctctttaaacttagtggctccctctattgatgtgtctcttttcttgctctcctctattatgacccaactcaatcttcatgatccctcatgttctcctcccccttcttcttctcctttcctctttctcctacctctctccccctctcccatgctcccaatttgttcaggagctcttgtccatttccccttcaccatggaaccatgtatgtctttcttatggtcctccttgtttccttgcttctctggagatatggattgtaggctggtaatcttttgctctatgtttaatatccatatatgagtgagtacataccatgtttgtctttctgtgaccacgttaccttacttaggatagtttcttctagttccatccatttgccttcaaatttcaagatttcattgtttctttccactgagtagtactccattgtgtaaatgtaccacactttctttatccattcttgggttgaggggggtctagattgcttccaggttctggctattacaaataatgctactatgaacatagatttccttgtatgaatgtgcatcctttgggtacatgcccaagagtggaattgctggatcttcaggtagactgattccctttttcctgaggaagtgccatactgatttctaaagtgtctgtacaagttggcactcccaccagcagtggaggagtgttcccctatctccacatcctctccagcacacactgtcattggtggttttgttttagccattctgataggagtaagatgatatctcagaattgttttgagttgcatttccctgatggctaaggatgttgagtaatttcttaagtgtccttcagctatttgagattcctctattgagaattctctgtttagctctgtaccccactttttaattgaattatttggtgttttggtgactaacttcttgagttctttgtatattttggaaatcagtcctctgtcagatgtggggttggtaaagatcttttcccgttctgttgactgtgtcttttgccttacagaagcttctcagtttcaggaggtctcatttattaattgtctgtctcaatgtctgtgctactggctttatgttcagaaagtgtttgtttttcaagacagggtttctctgtttagccctggctgtcttgaaactagttctgcagaccaggctggcctcaacctcccaagtgctgggattaaaggcatttgacaccaagtctggctattctctcatcctttgttaataatctgaaacattagaggaaaaagttccatgtaatcgcaggtacccagaacatggctgtgacatgaaaagacagttgtaaaaagtaagggacctaaaataggacccgtcaagtctactctttgctagtgacaaatagtagtctgtatgagccgcactcccacatgactgaattagtaaatcaaggccagtttagggggatgtggagaagagctcatttacaaagggaaacaggctcattttagttttcaactcttctatcatgaacctaaaaccaaaggaaaatttctgggaacaagtgaggtttgtcagaaatgagtcaattgtttcacagcttcaccaaaactgtggagagaggaaagtttatagaccatcaaccctgtcgtgaaggcaccacaggtatcaaacatagtgaggcagattatgatcttcaaaccccagtcttccccacatggcaaacatctgtttccatagtccagacaccccaggatgaaatactctcatcataaagtgattcctcccaagagccaacatcatctgacattgaaatcatgaccactggtgggcatcaagacatggcaacattcttctatggattattcaaacatatattttatagcattatttctctagagcttaataatctcaaaggtgcctggtatacagtgtgtatattattttatatgttgaaaaagtatatggttattttattttgtaaagttaatactcttgaattgaaataaagaattctcatctgtatcaatctgttcaaataaaaattggactgattctttgggatttgttgaagatatacattttctatggcctacttggtgtctgcttatatttttgttgatttttagaaaggtggacaaaatatcgaatcctatcagaagaaataactcccagtacagtggtcatggagtgggagaagcatggggctcatcaggtttccaaccacactagttatagcaatttcattaacaaaacagaggttttgattagaaattataagccaattagctattttaggatcatttattttctatttacttctaacacaaatttttacatcaatttcagtatatgtgcaaaaaggagctaaccagggaaatgattagacaaatgggtgtctccacccacattagaaaaggggatctgagcccctgactcaggaaggataagaatgccagccagtgtcactcaaaactgagcaaattattagattaaaaatactacaaaggttacaaactactaggatacctattaaaatagctctcataatattgtttttctttgttatctgcagtgttaaaaaaacaaacaaacaaatcacctgtgaaggttgtgaatataactcaatggatgaagtatttcctatactggattcaattcccaacacccacaaaggattcagtaacagtcatatacatttatggccctagctaggggtaaaggaagaaacatatagatcctcagagcactttggccagtcaagttagccaaataaggagcagtaggtatagtgagagaccctgtggttcagccagtaaagcatttgttgcaacagcctgagctccatcacaagaaactgtagatggaagtttctgtccctcccagcctgcagctctacagttccaaataaagatgaagaggcttttattaattataaactgtttggcctattactcaggcttattactaacaaacttttacaacttaaattaacctataattcttatctatgcttatccaagtaagtgtcttggtaccttttcttaggcattcttatcttgcttcctctacatctggctggtgactgtgtcgctgactttcctcttcccagaattctcttagtcttgtattcccacctatacttcctgtctggctactattagccaatcagtgttttattaaaccaatacaagtgacaaatatttacagtgtacaagagcattatcccacatcaagaaaccatggtggaaggaacaaactgactcacagaagttaacctctggcagacacacacacacacacacacacacacacacacacaaatagtaataagaattctttaaaagagtgaaacatttcacacataaatctgggttacctcttgagtttttgttctttctttaaaaatcagcagtttctgagccccttgggctttattcgataaaacataaagtatattcttcttggtttgcctctgtctgtaccacacctaatgtcttctgtctatctccattcaattacatacattaccagctcaagccccagaaggcacttaaatctgcagtctcctaaagttcatatctacaaatgacaatcagctgtggccctgaatagtctatcttttgtaagagaaaggtgttccatctactcatttggatggtgtcaaaagctgttttcaaagagcaattttttaagaaagtaagagatgatacatatggaagactaaattgaagagctcgagcctcagcaatggattaaataatatatgctaggggttctcttcaaatacaagataactatgggatggatggactaggctttactttacacaaatggaaaggtacaggatgtatgtaacatttattttacccactctctctactctaaagtattccaagcttacaaatcacttcaagtactgatataattccattttccggtcaaggacatatagtatacatttctctgtatacatttaccactgactctgaatctctgtatttgttcccatctgcttcaggaggaaacttctctgatgagggctgaataaagcattgatctatgagtacaggagaaaatcattaggagtcattttatcactcctttttcttttttaagaccagtagtacttagttttaatctaggtctctggactatctagtctctggttcttggtcacccaagcagtatctgatatggattctatctcatggagtgagctttaaatcaaatctgacattagatggttactcccacaagctttgtaccagcattgccctagcatatcttgcaggcaggacagcattggagattaaagggtttaatttgtttaatttgcatctgggttgttgtttacatttctattttgggaacctacagagtactatatagccatcagctccacttcttaatgttaaatgagttgtgtgagtgctgtcttcagtaatggtaccctgctgtcagtttgtggatagcaacgcactgacttggcaacaacctaggttgtttgggaatttccatggaatcccattggtcaacaagtcaattggatgtaatccagttccagtatgggaaacttcattttgtgacaagagatgggattccacctcccccattatttggagacttcattaggattaccttcatacatacattttaggaagtttccactgcactaagtttccataccaaccctcaaattccctcaattctgtatatggctacaaaagaagctcatggactaacgagaaattgctatgtgtttatgtaggcaactcccagagctgttcatacctgagctccttctctaaccatcaaccagtgcctgagaaatattgcatctactgcctgcacacagccatggagattatacttcaaggcaccactttgcctcacactttggactatttccaaccaaatacatgtaatctattttgttttggtaactaattctacgggtaatcacttactggctgaaaaattgccttacaaagtaagcatcttcaatcaagtagagtcccaaaagcttgaagatgaagctcagccagtaacaattgagaccacaaacaccactatgccttcttcaaaacttgggctttcctgagggcatgctgaaagacagcacctaaggagcgaatattagttagcattgaacctctccactttgtgaaacttgaacagctagatataaacacaggcggtgttaactgtggtgagccttttccaagcttaagatcacattctctgtaaagcagaatttaatatttgtcaagccagaagataagatggccagaaaatagcctcagaattttgatggtggcgttcaagattatgcaaatgctgtctttgtatagcacccatactgaaatgaaattttctgagataacatttggaagacctcacatgctgttcctctatgtgccaagcttgatatccataaatagtctctgcaaccttgactgtttggctgagcaaatattcataactttaaatgcctcactactggtgggctcagtgtgacaaatcataaagaagttatttttcctataccctgtgaagacttagcaatatggacaagtgatactggcttgcctcttctacatcaggtgtaggtaacatgatgacctggtgggtgatttttggagccaatcagtctgaagttgtactggatgcctgattttgcataatatgtgtctcagtttcctcaagcaaaatgggtattagaataaaatagctacttgccaggctatggtgatgattaaatgagataacgaatatatgaaagttattccacagtgattagcatgtctaatacactcatctaactattgatttcttagtaccttccaagaagtatggtatgcttgtctctgaagaaccatcagggactctcactagcctatttattacatcagaagggatttctattgattctaaggcaggagtcaactgctcttcacatcaggtcatttgcagagcaactagaaaggcattaatacacttggctagatgttagtttagcctacctcttgtcactggtcattgataatgggaacacagattctgcaactgtctctgtcttcaggagctgttgtcacagattcccagtctgttggaggtagcagccaaagggaagtagaaggagttgaatgaggctgccttcagaggggatgaacagctatggtaacaaaactacctggcagtaggtgtgtatcagagatggaaaggagggctgttagaaataaagcatccatccatgaattaatatcatggagcatgttaaaagtggtcagactcaaggctctagtaggctgggtcttcatccccctttccattgcagtcctagagttatatccaaccagaaaacagcagggtagcctcagaggattccaacctccatagatgccaaggattgcctgcaggctgaatcaatattgtcccaaatagatattcaaaccatgcttcgagtggaagtcctttactgaggacactggcaccatcttttagctggaaatcctctatgtcaacagactctaaaagtacagcttaaaggatgaatctgaattttcgcctactgtaaagctggtctttttattgtatattttggaagccaccccccttgtgttcaggctagaatgcagctgatcagcattgcctagttttttcctataaggaagaataacccttggggttctatgttgtggacaagatccctttagctccctgaacatgtgcatggattctgcataatatccttcagctctcacagtctgtaagctcataagctctaggtactttgaaataaccaattccgaactcttctccacaaaggataatgaaacctaagtgacctcaaatttcaccaacacactaattatccatagacaccaaagcagcacaaagtcctagcaaaatgatgacttatattatagagaaaattcttttacttgtatttgtattaatgcctcaggaaaactaaaaaatctgtatggatgaggatacatgtgagtgtctgtgtgtgtatgtagttccaggatattttatttttttaaatctccattcttctttctagttttacaaaactggagtgttttctacgaacccggcaaaggttgtttgtattgcccctgatttgaactcagactagagaaagggcttgatgacagcttgaatggtatatcactaaagtgggttagattgagtacaatgagtaactggtttagtcatacaattaatagcacagcccttcctaccctgtgtccctgtagatacacatttcaacctctatctactgtctccattaaaagcctcacttgatctccagtgagtacctaacccatctgtccattctcttggtatagacactcagctaactggcttgagaagattacttttgtatttcaattttcccagcatcacaatgaacaactgcgtgcaaaattcaagtagtaagtaacaaaacatttgaatcgatgaaaatggtcaaatggagctctgctttatgcattcatatactgcgagttgatgactttaggatctaggctggcactgagcaggggctctgtgctcccatgggatgctgttcctataaactcttccctggtcatcccccagaggcaggaaattctatattaaaagttgctgttgtatgaaaactcctagcacttctaaagatgagaggatttgagtggcttttgtttctttaatgatctaaaaattatcagactaaattgttgaacttagaaacatgccttctcatttaatctactgttctctgagttctttaatcatgtctatatctccattataaaataaggacacatgtgccagtctgtgttatggcctaacataccacccccacactcaggggcttataaaaaatgtgtgttattagctataattctgtgggccagccaggtcagtgtagctgaccactgaggatacttaaaatcttgacaggagatgactgatccaagatggtcttactcacatttccagtgattataaaattgtcatacaagggcctcagttggcatgacctttcctgaatgagctagcctaggcttctcatggggcctttggattccaaaaagtaataagcaatgtcaaactccagtgatccagtgagcacagacatgtcaaacttttcactctcagatttgctatggtcctttggccaaagaaagtcacttgcccagtctagactcagtgtagggggctgtgttgtaagtatggatgcagaggtacatacataaccttgaggtcccttaatgcaacaagacagactaatagaatggaaattccattcaattcagacaggtgttttttgttttggtttggtttgggttttttgggttgtttgttttgtttgttgtttttgttttttgtttgtttgtttgttttggagtgttggtattttgctggaaaatcactctgtggaagtctgtgttgttattaggtgttgatcatttctttccttctgtgcacagccctgtgttacaagacttatgtcactcttaagaattaaatttaataggcaatatgcaaaatctataatgaagccagggcgatatgaaaccctaacagcagatgaaacttacacaggtatgctttgaagcatgatatggagccagtgggacaactggcaccccctgcccagggagagtcagtttcctcactcagaaatcaagggattgctgctcagccttcacctatctcttgtgttctttaaccacaagacatttggagtgcgcataattgtactaaaactggttctatgatccagtaagcatatggatgtattatactttttaaaaaaatactgactttggcaagttcaggcagatacattatatttgtgtcaaaggaagccaatgtctacttttttatctacacataaagttatgttggtaaaattcaagctaatgatggaaatgagtctgcctcttggcctaataaatgccattatatacagtgtaacattgttatggatcatcatcattcattatggctgggtattctttgatttaaaacaagggtgggtattgtactcttaattcatcatccagttacctttccttctgagggaaaaatagaaagcacttctcattcgtttgggacaattagtgcatgaaatagtatattctttacgtaagaacgggatctttgaagctatcgatggaatcatgtttagtcagctaaagcacatgcattgccttgttctatgggtacaaagtgattcaaagcaagatatcatttaatcctccaagcaaagcagtcatgcttttttctggcctgcttgcactgttgacgttgttttcctctggatttgactctgttagacgaggtttttttaatcagggactcagaaagaatcaaaagctttatagtcaagattggcaaagggatgactccagccatcattttccatgaaataacattaatgtctacagcatacaggtagcacttggcctcaggatactgagaacctgagagacatcatgctcagtagggcatctgtattcagggccaggacactcctcagtcccacctgtccacatttatatccagtctatatgtttgtaattttgcaagtagataaaaaaacaaaaagtgcacttaaggaaaccaagaattttagtggtaagaaggaatctatgaacagaaagaaacttgcaagtgggctgctgtgcctttccaatttctgtcattactggaattggactactaagcaactcttaagcatcccttccctaaacacacacacacacacacacagagagagagaagagagagagagagagagagagagagagagagagagagaagggggcaggggagagaagggtgagtgggaaagaaaaatctaaagaaaaaaaaaagagcctaacaagaatggaatttcaattctgaccttgactaacttgtaatgaggctttaggcaagtggctctgtaagcctcaatagttttctcaatctaaaatttgtgacaatcaactcatttattgaaggaaacacattggatggaataccttttacacaaatatagtttttcttttcacactttgcttcctcatttccacatctgtgaaaactaaacttgagaagggaaggggaggggagggaaaaccatgggattctcatggcagacttccatgtacccttgtgggtatcatgttatcttctttcctagagacttgttgatatggccaactgcacactcaacccaaatcatgataatcacaacttgcccaggaaagcatggcatgccacaggcaccagtatgggtaccccattacatgctccccattcttctttgctccagtttaccatcccttattaatcaattcatgaaacttattagccttctgtggtggataagaataaagactcttgtatcggcttatttagattaaaaatatgccctcttcacccactacctgtgtgaccttggaaactccttaatgctgttgtgcttcaatgaactgtcacacaaatataccagtgagatggcatttaaaatcttgccagtcgataataggagaaataatagtggagtgatgccaatagcagcagctgcagtactcacagtaggagcactgtgcatgcaagaagtagcaagaaatggcagtatttcctgctaggctagaatgcacatttttaaaccaccttattcccatttgtgcctagcatactataggcacccaaacatacttgttgaaagactgatttcattgaattaaaatatatcataaatatataaataacccatgtgtatacctatatcatatatgcatacacatgcatgtgcacacacacacacacacacacacacacacacacacacacacacacacacacaccatgggctgtagtctcataaatatggttaaaactctgtactctgaccttgaacttagtcagtctgaggcccaagatttgattccaccaccaaattatggtgcttttggaaattgccttaaccttcaccactgcgcatctccacttgtaagcagaatttaccatgaggactaaataagagagtgtgtacgaaatgaaatgcatctgtgcttgcttggagtcagatcttcctgtgatggcctgtcatgccacatctagattttcagcccagccagctgggtgttctgtccctcaggggataccaggaggtgttttacagatgcctgttctcaccttgtgagaattagttccattttcaccccagaaagactcataatcacagtgatttgattgttttaatgggaatttcaaaactatctaaatggcattgaaaaggaggaagaatgaagtttcaaacactagctagaaagcacttgagatccttgttgattgagttcttaaacagtggatcttgttggagactgaatacctaaactttaaccagctccattgtgcttataaaaaaatgtctcagtctggggatggggactggaatggaaggatcagatgagagtgcaggggaaatggggttgaaggagggaatgagataagtgacagctaagaattgaagggcgtttaaggggtagcatggaaacctactgtagtggaaagttcctaaaatatttgaaggtgatcctaatgaagtctcctaataatgggggagatggctcccaactggccgtctcttgttaccaaataaagcttccagtcaaactggttatatggaatctctggatagcaaggctgttgccaaggcaatgggttgctattcataaactgatagtaagtccccatggctgaagacaatacccacacaactcactgaaccttgagaggagaagctggtacttatatagaacctacattctaatgtctatggtattgaatgctactctacaagctaccaaaagacaagccctttggtctacagtgctgtcctgtttgcaaaatacgctagagcaatggtggaacaaaatttgcagagtaaccaaccaatgcctaatttgacttgaggctcactccatggcatagagcccatacctgacactgcttgggtgaccaagaaccagagactagaaaggccaaagactcagggtaaaaccaaatactactggccttaaaaaaaaatgttcccagtcctgaataggtaccacaagattccatgcaaggaagcaatgtccatggtagattcagcatctattcagcatccagagaatcatggatctccatggctcttcactaacatgaaattcctaacctttaaaaatattttagaatacatgttgtacaaactcattacaagtaaacaaaaaactacacatgtatgccaaataataaacaacaaaatatgtttatttcaaagtgagagtcactggaattctttggctgccagaagccaaatgaattcatgttgagttctttacataacaaggactctagtgggtatattaagtacatttcatttactaatacacaactggaagcgacgtgggttctcagttttcccatttgtaaatttttaaatgaaaacagttttttcatgtaatatattctgatcatgcttcccttctccctcaactcctcccagatccccacctcttccctaatgcaattccactctctttctctttaaaaaaaaataaataaataaaatctaagaaacatatttaaaaaaaatacatgaaaatggaaaccaaaatacacaaacaaacaaccaataacacacataaaaaacaaataaaataaaatgagatcaaaaatcctacaaaaataccagagttcattttttgttgaccaactactctttcagggcctaccttgaagtacagttgatacactcagactcctttggaaaaatattaattcttccttttccaatgggcatcatttgcagatagcttcttggataagggtgatgtcctatgtcctatgagactcctctgtctcagcattgacagccctctggcttgaacctgtgcaggccctgtgctatgcatgctgctacagtttctgtgagttcacatatgcatcagtcctgatgtggctggaagatgtttccttgggattcattcatcacctctggttcttgcaatcatttcagctcctcttccacataaatccctaagcccttggggaagaggcttgatgaagatgttccatttaggactcagtgttccatttagaatctctcactcccttgcacattgtccagtctctatgttagttcccagctattgtataaggaagctttataacattgctgaccaagatactgacctataggtacagcaaaatgtcattaggagtcattttattgctgttctttagcagaacaatatttggttttcctgggcgtccctttttttattattttcagtgagcttagaatgttacttgtgtgtgtgtgagagagagagagaggggggggggtatgatgtgtgatgttagttgattgttttggtctttgcaaaatagaaggcatctgactatctacaataacccatattttggtaatctagaagcagaacattgccatccatactggagccctttgttttctcttcttaaagttcatacttcccagaaaaaaattcaggaatgacaagactggacctcagttcctggccaagttaatgtggtccttgaagcagatatatacatgaaaagtgttgactctccaacccccattttcacctgataaaccagaatctctctttaaaggtggtctgcacatgcatcgaggttctgagagtcactttcctgtgagactcttctcattgctggccaacagcctccttagattatcctgtgatgctactgtaagatttgggagtgagaactttccagtaactttggagtctcctctatcaccactcattgatcaactaggccagtttctggagataggtgactaaattgcttatggaccatagagcatttcagagatcgatgcatgcatgcttgagtagaatctgaagagccagatttaagctggctagtaatgatcgatgtcatgtgtcaaaaacctgcagtggaagagaaggaggtactgtgagcctgccaagaccagtccaaaaccaaaactgaggaatggaaagggatcagtagctaagaaatatggccagggacaagcccaggtggaactttccaagccagaatcttcctagtttctatagactgttgcttgggctaatgaaagtgacagcagctttatatttgtggtgtcttcaggtgtggccatttatccattcattattcaactctctggtgatgtagttccaaaaatgcacaccaaattttgtttaattcagttaagtcaatacttactgattgtgtaaccataatcatgacaaaggagaggaggaataaagctacagagtcagaattagcagccaattgtacagtgaatgccatcccttttccaagcagaataacatcacatgaatccttctgtctacttctattttatgttgttttagtccattttactcaccattccaaagaccttggttaccttgtatctgtgactgctacaagaagaatgacttagagtaactgggaaggaaaatataacagaagcaatgctgttctttcaggaaaacactgatccagtcagaaagtggcagcctgtcatacaatgaaaggaatgagacataaatagaagaccagagatcaggaagcacatagccctctgggttcactttcacacgggtacccacactagtctacacctcaggagacctaagtctctttacttcccgtcgaggctgtggggccttgaaagagagctgcacatttacaaaagctagcgtgtgttcagaataccatatctgagaaaacttaagattatgtaacgtattttataaagatataaagatcctctcaaatgaggatccaataagaaaatcacggtgctggaaacagcaggcacggtgcatctggaaggtttgcaatggctcacaccacaaacgtctgaacagctgaagcttcagtatgtgtttaaaagggaaaaaacgtactcggcatgatgacaaacaggctggaagaaggaaacttgtgtgcatgggccctgatttatctatgtgtctcttgcatgtgggagacttgtgcaccatcagcaccagctgtgcacttatgaacactgtgtagcccttcccatctgagctgtcaccacacactccacatgctccaacccccctggtggttaattccaccaaaactttaggaatctccagacaggagcttatttacctgttccttaaggaagactttaaatgtgtttatctgggtataaaatatgaaagtcatatgcacagcctacatatagtatgcaaattgatatagcatattaaatataattatcacatgtaaagagaaacaaatacagacaggtcatcatggaactggaaatatgcatggaaaaaaatcctatgaacatactcgaaacccttagctgactttctttaggaaataaaattacttgcaatttcctttcttctttgtagctctgcattctctcaatgtttttaggaaaacaccacaaatttatatatgatatcccatatcatatggggaaaagatcagagagaggaaactgaaaaaggaagatacaaagaaggatggggaggagagggaagcagaggaagaaggaaagtagaaggagaataaaggaagtttaaaaagatgaggaaatgggaaaggacaggggaaggagaagacggaaggggagaaggacggaggaaagcgtaatggacagggtgagtgagatgagctggttgattgatttctcagttgctgctcatcctgtaatgtgtcctttaactttctccatactaaaataccctaccttcttgactgtatggagcttctttgacatagcccattgattgttgtacatgcccagttcctaaagacgtcccatccttatacatggtcaaagatggagagcctgcactgatttccccagccacaaacagccctctggggctacgccatactcagtcgggttacctttctgatctgaaacatggcataaaagagaaagagaaaaagaaaaaaaaacttggctataatggtggccaccttgtcacaggttagtacaaatacaggccattgatgaagaccggatatggaccaacctggtctgagaattccctggtgctttctgctcagagggtaaaaagggcccaagtcacctgaggaagcagtcttacttgtctctctcctaagcatgccctttctttgtatgctggttaagtctaaacggcataaaatgggattgacatcatgtaattacttgccttttacactgtgctaacttaatttgcttttcattctcaggtatttaagagaccattattttcccatcagacgttactgtctgtcaattaaagcattagatcgatgaggtagagagagcacaccattcaggaagattccgggtgggcatactgaaagtaacagctttgtgtcactttccctttgtcaaagacacaattatgtcaccagttcacccacttagatgacaccctttcttcaacatatgtcatagtttgattctacttgaaaataaaatatggcttctctgtagaatagattttacaactaaatattaactatgtcctctctaaataaaggaacgggggacaataacaggagctggagttgttggggtgcatatttatgtgtttaggggatcctgaattaaaggatacatgctaagcccatgttttactagacgagaatttcatcagaaaccacatcccagccctatggcaccagttcagtttcatgatcaaatatgatttgtttctgaagaaagtaagggtttgagctgtttaagtaatggtgtgatgacctgaaccaaaaaaaaaaaaaacaaaaaacaaaaacaaaaacaaaaaaaaaaaaaaaaaaaacacatcgtttttcttcttgttcggtctcatttaagtaataagagctgtggcactgagggctttctatctcatcccttgaaacccagtcatttgctctttctctgtgtcattatggaaagcgcctgtgctttggaagtacaggaaatcatagtaattgcccaagaacagccgagggagaaagggtccgggacaaaggtacagacatttgtcaactccagagagtactttcttaaggaagagaattaccaagtaagaaaaggtcatcataagcacagcagatgactcgcaccattaacaaactagtaggctggccattctgataattcagaggcctccaagaagaaaatggcttatgcaaccattaattacaaaatacaattgttgtctgtgctggcctccttgccaaacttcctgattctgcttctggtctggaaaagtgggtgtttatcaagcaaaggactaggggctgttttgattaccctaatcccaggtttagaacacacactggttcaatctatcactcccttctgagagtctatccctgggagataaggcttttgactaacaattctgcctcagagttaaccctgaaaccgctgcaggcatgaatcaaagatgctctgtcacaactcctgaacccctgcttcctctgcctgtttgaaaaagcttcgttagatggccactagccacatttagtgaatttagctacctaaattcatattgaaagtgaaaattaattggaatgtaattcatttgaactagtcacattccaagtagtccataatcatgtcactagtggctagcatactggacagtacagaagcagaacttgtttatcatcataagaagttcaactaggcactgtgcgactacagatcttgctctcttgtgacaaccctcctctccaaggtaacgcccaaccatgcataagcatccaatagtcaatatgggatttcccctaaaagttccctcagaggacataatttgccttactgtgcctatatccaaaactggttcaggctagataggatcccatgcctctagacctcaggtatattattccaggacatgtataaatggaaactaaccacaaaacaggccttgctacaggactacaatgtagggagcaacttattctattgactgatgtgaggtctacaaacagcctgaaacaggtgaggctcataggttgttgggtgcattttggggagaaggatatcccaattccattggagtttcaggttgctaagttatttctatacttacctgcctcaccactgggcctgtggtcaaaaatctgtactctgcttcaactgcatacaaacaacacatttaaagatgtgaaagcaagcccaatggctatctgatatcaaaagtgtactataccatctcttttcttccatggtcctagataatgtccaaattgagaaaattattagtagtattatttaccaactaaaatcctcaacagtgaccagagctaggcatattctgaggctgaaaattttctttaacaaatgtctaacttcttaagctagcatctcctagaaatttgctcatctcctcaagtgacaaattgatcactggttcataagacagagttccagatgatgcactcacaggagctccagataggtccttctccctcctccataaaacttccctgttgtgtcttcttactcatatatgtgtatgccacacacctctaacacctaattcactctcaggaggcctggctctctggctttacttcatatttgatttgaccagggagttttgtgagatttggtctcaacaccctagacttgacttgaactcacaaattttgccacagttttgccaaagtttggcaccacatatgtgtgccagtatgcctgacaacaaaggtatggtctagaaacagtgtaggaactagaggaacaagtagtttgctatgagattatcttctaggaatgtcagaaattacacccataaagtctcaccaacatgactacctaaccatgagctgagaaaggacaataccagtagacaatgctaatatgaatgggggaaatcccatgaggcttcaaccctggacaaagagctataggcctctaaggaatgctaaaagctggagaaatagtcttccttaaggaagagtataccaatcagttacttaataccaaatggtcagccttgaaagcatgtacatacaaatagtataagtaacactgttcagactgaacaggttttatttatttatttaggaatatattatatacatacaagaattgtgtatgtctatgtatgtatatacatatatatgtaacaacaattactgaaaaaagaggccatgaatttgaaagagggcaggaagaaagggatatgagtagatttagaggaaggaaaagatgatgtaattatattataatctcaaaagtagtagaaatatttctaactggccaaaggatggaaccatctgataccacacagaccacagagagatgagttcagactcagtgttgtccttgatcaaatggaaagtaactatctatagatggtgataagtttcatagaaaattaagacaagcatcctagttcatgactggtatcttagctgttttcttttgctatgataaaacactatgaccaaaactcaagctggaagagaaaggttctatttcattttatattttatgcatatctaagttctaaaacgtgtgaccaaaattttcatttcttcatttggaaaaaaaagaaggccctgcattttgtggagggacatccagctccctgtcaaggacacctcctctctgtcatcacagaaacgtctcagatcctaggatctgagaatctatcgctaccctctttgggcagcttaagatgtctctgacaaaggccttttttactctgaatttgagtttcttcctcagaagaaagccataggatgaaaagatcttttatacaaactattttgaatttctggacctgacctgaagtagccaatgattttcaaaaaaaacaatgcctgaatgaatggatcctgtactattgtgccaaagaataaatggtacggatgcatgtgagacaccttttactcctgcatactgtattaaggaaaacaaccagaacaagtaaatgttctgatggcaaaagaagaagctgggcttgtatttgagaagtacatgtgttaggtatcttccctgtgtaatgtaataagctgtgagaatagcatggcatctttctgaaggaaaaaatagatggtctatggaagagctctccatcatgcactatctggcaagtcagctctcaattattaatccctaaaacagttttaccccctacattagccactgggtgtactcaggtaaacacaggaacccagcatgtctgggcctggggcctttttactgatgcagggcaatggagcccatctataagacagaaaatgttcctgtttagtattggcctcagcacagtggcactgtctttgtgacagacacaggtcaattacatttcagtgggatttcattttgttatttcagcaatctctgagacaggaatcatcatgatagttgattaatggagaaacagacacaaagaagttgatcttctgggccaaagatgtgtctcactagaccacataccaaacagtgcatgtccaaaaccttcactgagaaccaatgattcccatagtctggtcttcagtcatattcttccaggccagcctctctactatcacaaacttctctgggctttgaaagatgccggtcccaattccactgagcttcactgttgcccaagaataagactcaacccaattaatgtattgctaggtattgaaattatctcacacactgtaaacttgctatttgtgatagttataatgaggtgttgtgtccagtttccttctacatcatggtgggggactgcacttgtgagtgctgggatgggtaaccttgggtttcacacatgctagacaactggtataccactggaaacatcctgtctccagcactgaaaagttgctattttctagtgaatacagagagatggatattcactggtagatgggagtgagtaggagagaacaactataaagttttagcttgctcacatgtattgcaataaacttttttaaagttgaatgttatcctagtcgttactcttaagagattacctacttatatgtgaatggtgccaagcagagtggtagtcatttagtaacaatagccctagtattattgtattacatattattttacataatataggattatttaagaagctttgatagcttttgaactaatgacctgaaatctcaaataagtcagaagggcacatgcagtgcccatctccaatttcaagtggattcattttgagtattctttgaatattttgcctctttaaattatcctaatgatcttgtctttttcatacccaaagcaatatcagctactcagcacagccatttagactcttccaaaaaatcagaataagcacttttgtcaaacatacctaaaacaactgcttggtcgacacatcacaccaccaactgcctttagcaaacaaaagataattttcagattctgagtgctaactattcttggacccattagttgcaaggtcacaggcaaattggattgcctgttctatcagagtttccatcagagtcaaggatatgtactgacctttatttactgaaatgcccctgcagcacccgtgccccagtctttaactgttaggttatagttcttaatcttcaaccattagacaataattcattattctttcagatcataaaatcattatctgtttagcaaatgtgggatgttaaataccaattgtttctactggacggtttttatctcagcaaacaagaaaaaagacttgtctgagtggaaggagaagagaaatcttctgcacagctgatatgacatacatcactggagacacctcgggctctgctgacccccgatgcagctatattttaataatgctttccaagcagtttgcaaataactttaccacttaatagtgctaaggacagcagcttgaacacctaataagcatcaaggatgagaaacaaacagtgagtacagcacaagtgcagacaataccccgctcgctagattctgtccacatccaggcctttccttttgttgtggcaaaacgagatgagatcccaagttgtacacaaagtactgttaacctccaaaggtaaggagagagagcatcatgggcatgcatttctttgctcttttatttctagagatcagaatatgaaacaatattcagcaagaagtattacgaaggtgttactgaaactaagtaaaaatattaatgaagaaaatgctactggatacacacataccaataatctcaacattctagaagccaaagcaggttgatcatgagttcaaaaccagcctagactgcatagagagagtccttggccaacctggaccacatagttaaaaaaaaatagcaatgttgctgagtagttctgggtttactccttggtgctgagaagagaaaaagaagcaaggaggactagaaggagtaggggtggggaaggagggaaaggagaaaaaaaggtcaaccctacctaatgtatatgattggaaggtatatgaaaataaacaagtaaaagttctcatttggagacagatttgtgaaggtaaccaaacttcatgaaggtgaacaagatcctaaacagactttagggccaaaactcagagaacagttctctaaagagaggcagtcttgggaaattttaaccctaaacactactgtccatagtacctccagtccatcctacaagggcaatccctaagctacccctcagaaaaaaaagatgactcggtatttgcttatcttaaagaggatggggcttgtgcaatgtgcagcctgtctttgatgtgaggaccaactcgtcctggtgatatgtcttaggatcattattcaggacttcctcaagtagagggaataagcgcttaatatacttaagactgaagtatatctttcttgaagtgtccctaaaatcactcacctttgcaattgactactgtgtggctgaaagaatgaaataaagtaatgcattagaagagacacaattgttccttcatccaatggatccttgaggaatctggaaatgaaaacagagaatggcttaatatacttgcctttgattgcatctctggattttctccttttaccttagatcagactggactgtttagagtttgaaaaagagcattctatatttagtttggcaacatatgtttttatattcttgatttgtttttcaccctattcagtaaaatattcacaattttagttggctgcaagctcctgtaagaagtcccaggaagaatgagagaaaaaggaccgttcacagtgttattttataaaatgcttcagggacaaatttctttctgctaatgtaaacgtgggctgcccataaagataatgctgttattcttgggtgtttctacatttttaagtaaattcgctgtatttggtcgttaagcagtctcttggtgagtatgttccttagaagatatgagatgagaaacttagctctttttcttgtttagtacaaaactgagttagtttagcactaatgactctacctgaattctttgatgggattgcctagcttttggggaaatgaaggtttgttgctggtatcttagtacagaagcaggggataaggaatagtatttaaacaattgtgataaatgaatctaactacatagatattgtctaaaacaaaatcagtagtacaaaaaaatcactgtttacaaagaaataggctattctttttttatgaccataataaaaaaaaatgagactagttaggaatgtttttgctagaaaattttgagctaacaaagtttacatgaaagtgtaataataattagctccttagtgagacaactggtcactatgtcacttgaattagacaatctaagtctatcatgtaatgttacatgtttagtaaggcgcaagcttactgccattgccctaacattagacaacaatggtctccatgacatgtgagcttccacgggaggtcccttgaactcagcttctcaaattatgatctcttgggagggattcatatgtttcctctgcctttgcatatttttgaaaatgatgccccctccacacagaagactgccctacagattgggaataagtagaatgtgcatcattagaaaaaactgaaattcaccactaaattgagggctataatggtgactacagatgctagtgtttctcctttgatagcattagggggctcttggaacactgaaaagcttccagagaactacaagtgagtgaaatatctcacattcaataacaaatagaggggaaaaaatcatgtctggatttatactacagagtgttcatgtacacataaataaatgtctatacatacttccacatctttaagcatataaacatatatatatttattatacacactcaacagcaaggctctaagacaaatttctaactagaaccgtaagactctgcaagcagtttcatttgcagtaatcttccttgacagaactccataataagctaaccccacagcacttcttactgcactaatgagatcaactgagaagcatagaaaccttgtttgtatttcagagggtttgtggatgtgccactcacacaaaggctataggggtatggtgtaagaatgctactgagattgatcaggagggggagggataccataaggaaatggattgttctacccagagctgaactattagtcaaggattaccccacacacacaccccgtggatggtgaacaggactggggaagtctgtaacatttccaacacacttaacttatgaactagaaattccatgaaacaaggtttttgattcagttatcccatatgccaccaacaaacaaatatttgcaaaatgaacaagtaataaaatttaactttatttcctaaggttctgactatcattcctacaaagttaggattgctactgaataaggaagattttacttaatacaaaaaagtgggacttttatgtaactaagcagtaattgttcccaaatatctgccttatatattcttatgcaacaactcacaaaagaaaagcaatacatttttttttctttttggttttttgagacagggtttctctgtcctagaactagctctgtagaccagattggcctggaactcgcagagatccacctgcctctccccccccccaatgctgggattaaaggtgtgcgccaccactgcccggcttaaaagcaatataattttatatgattctatgaagttcctcttgttagttttcttaaggtttaaagcctgaaatgtttaaagaaagctaagcaatgtgttactaaatgaacaaccatggcttaaattttctggctgaaatttaggaattcaggtgctacttttcttttttcttttctttttttttccgatctgcagacttgttttatcattaataaattataaaattgggtttatgccagagttgtgttcttttgactgaaaatagtttttttcacaatatattttgatcagtttcctctcccacatcccatccaagatcctctccacttacactgacccaaacccacaccctcttctctctttagaacacaaataggcatcaataataataataataataataataataataataataataataataaataagttaaaaataaaaacaaacaaaccagaataagagaaacaaacaggaaaaacaaacccatggaaagagcactagaagcacagagaggctgagactcccacattcacacacccagagaaccccaaaaaccaaaagttagaaaccatagtaaataagcaaaagatggggggctactcttaacttgaacatttgctaggccctttattgcctattctgatactcatagaactttctcttagattaaataaataagtaagaggattgctgagaaagaactcagaaatgtgaaaaggctcagttttctaatgtgagtctgattcaaagttaaagtatttgaaaactcagtcaccagaataaacagctttagattaatgcaataatctctgcactccaccaaaattaaactgctaacattccttagtggagtatgcaagatgaatgctcactggctcaagtgctccatttgtaaaacagtaaatagatgactccatacctctgtgtagacactgagaaaatgctacagccatttgatcattctgattccctactcaaagagtaaactgatgaatggaggcacagtttcaatatacaggcctgaagaaaaggctgtcagtatatatatagtaatagtggatagtattgataaatatttccaatgtacacaggatttaatatgcattttatttctcaaacagcaaaatataactttatcgttagaaacatgtcctggaagaaggaactaaggcacagaagagtagatgggttaactcactctaaaccagtggttttcaaccttcctaatctgggcagttcctcgtgttgtgatgaccccagccataaaattatttaattgctacttcataactgcaatttttctactgttatgaattgtaatctaaatgcctgatatgcaggatatctgttatttgaccccctccccaaagggatcatgacccactggttcagaactactgctcgaaatgattaagtactcaattctgatttgtacccagacactgaaattctggaacagattatcaattgaaggcaatgtctaaaaatcttgtaggactctaagctgctactctagcacacttagtggtagcttagagtatttaaagtccacagaaacactcccaagggtgggggggaagaatcgtccaggccaaagagtcaataacgggagatgtcatccccctctagaacttaacttttagcatttgtctgcagttttctattacagaatttaggcaaaatcatggtgttcataaatacagcaactcatgtcactaatgagtaattactactcacatgtaaccttacaaccctttctcattgcaatactaattattgtaatcactataatagtgtgctatcctgacctgaaagtcaactcatcatagcctatagaataaaaattctgctgtcacttcccaaaattcttactgaattagtctggcataaggctttggggaattagacattttttttcaagttccccaagcatttttattgtgcagccaagttttaagaaatgtgtaggaaaaaaatagcagatatttttaaagtatggaacactttctattctccaatgaagtaacagtatagtaatggcaaaaagttattgagtggcttataatatgaccaggactgctctgaattaaagaattagcatactttaaattccccaacacctccgtcagaaaggtgggtgttcttacaacttttcttagtttgagctgttataattaagtatggactaggtggtttataaaaacagcaatttatttgttagaattctagaagctagttaacccacagtgccagcagattcaatgtctggagctcactctttggctcacagatggtgcctcttgttatgtcctcatatagtagaaacagcaaggcagatcactgtgccttcattacctaatgaccttacagaagccagcaccctgaagtcaggatttcagcatccgcattttggacacaagaacatccagacatcaccattttacagacagtgaggcgaaaacatctgaagattaaagaacttatccagtccacacagctagtgtgtatgtgacagagctgtgaattaaatggagctcgttctgactggaaccctgtgcagtacaccagtaactctgaaacgtaagcatgcactgaaccatctggagaactttaaaaaaaaagaaaaaaaaaaaaacagacagctgagccctacccctacagtgtctgattcaggaggcctggaacagggcctaagaatctgcatttctaataaattcccactaatgctgcagccaccactgctaccattgctgctgcagtgacagccacctctgacctgaggaccatattttgcaaactatgccctaaactggaactgtttgctatcagatgaagctgctttctttcactttagtaagattcatttccttggttcatccttgagtcttgcaaaattttgtggaattgtctagattattttccttttagaccagaggtggcccaggttggttggaagagctggggttgggggtgagggtgtggagaccatcttcttgtcttttctagagaataatactgatgagagaaatctaccaactggatagaggaaacacccagatcaacgggataacaatctaaagtaacagtgacaattaaacataaggcaaaggaaaggaaaacaggtgtatcaaggaaagaattggaagaagtttctttcaacctcttgtttatatactagagtcaatttataaagaacagaggcaagagcttaaaagcttgctttcactcttaacctccccctcttttcaatgagacagtagcaaggaatcaaacacaccacagaaaaaagctatccatgtaaacatgaggtggggaccttgaaaagagagagtgtgagacatatataattcttcagtgtgtgaatgagcaagtatacactcatccattcacagactctgtactatgctagacacaagagatataggaagagggggttttattgctaaggagcttacacacagggtgaaaagtaagcatgtaaacaagattaatgacgcactccaggaccaaatgggtggtagagacacaggagccccctgtagacagatggtcaggagacactaaaaggaggtagtgggaattgagttgagtcataaatttgggtagctggaaaacagtggagaaaggccttaaggaggacagaaggagggagaagaggcaggaaaaggacaaagtcatgaagcactagggctttacaaagaaagaatggcattgccttaggttcacagacaagaacttgaagacagcctgtctgtgtgaggaaaagcccaggcaagggaaagaatgaatttatcttgcagagcccagagaatcaaaaagggttttcataagaaaagcaatgtaatgagaccatagttctagagaattcccatttgcccttctttcctcaacaaaagctgattccctccttgcatgtgagctgtcatctcccaccctgcactgtgcattaaggggacaattcctctgtaatgggatacatttgattcagttccagatctctcatacccattgcttgaatgaccaggccaggtctagagttcttttaagattcaggaggcttggagaagcataagattttgctcatggcatttgattctcagcccttatgaacagtgcctataaactccattttcaataagctaggatttgatcattcataagtagttaaccgtggtgagagggaggagatggctcagttaatgacatgcttgttgagtaagcctgagcacctgagtctgcgtacacaggatccatacaaaaagccaggcacaacagcactaggaggtaaggaaagacaagtggatgcctgaagtttgttggctacctcatatagtcaaatcaacaagcttcagcttcagtgagagactctctcaaaaactaaggaagagagcaattagaagatgggcaatgcttggtttcagtctgtggcttctgcatgaacatgcacgcacacatataggggaaaaagagagagattttgagttttaaagaaccaattctgtctccacaattaaacaataacatatagaatagatgaattaatttaatttcccccaaacctaattgcttacttagccacattggctacaggtctttcaagagtaaattatttttggtagtatacaaaaagctaacagtgactgtagaatcaattaagcgggactaaatccatagtctttaagactacacaggcccatgaatttttcccaggtgacttgtacaaataaaattaattgaatagtgattaactaatcatcaatgtcggatacattaacccataagagataacagtcagaatcctaaatgcttattcctgagaaaagcaaacctgggaagattatatccaactacggtcactgaattgcagctacatttcagacattgttaagcactttcacacttactcctcatgtgagtaggtgctctgatcatttcagaaatatgtagcctcagtcaagccttcttctgaacatgctggaggttatgagtgtccacactgactgcagcctacgagcttctttgactctggttgagagaaacccaggtctatgggtacaaatataaatatttaggaggctatttgacaaaaaatgaccatttagcagaataacaatagcaggtactgccatggggcctttgacctttgccatgggattttgactgggattacagtaccaggcatgaaattgtcttctgcagagcaagcctccaattcaaccagaaggcaggtattacccccttacagccatgccactatttcacaagtgggcacatcttatctggcaagttgggtacagagctggttaagtgcatttatatcttttctccaccaacaatctgcatagcattgcccagaatcatgaaaggtgtgttgtgcagccaaagttcatggtgtctttagcaataggatcttaccttaattatggcgggtaaccaagagcaatggcaatagccttggagacctctatggcgccctcaccaataattcataaaaaaaaaaaactgaaatttttttaacagctcatgtcttctgggtgtggctctgccacccatgcagggttcctccctttgggctcatttttgttgttgttgtatttcaaatttaggtaactaactactgggtttttcatgatgtttcctcatctatctttaatttacattagcacatcctctatcctacactctcctgtaccccctccctcagctcccaactccactctttatcaacccccattccccagcaaggcccagggaccatcttagaagaggagacagaaaacacactaagagctagaggatggggatgaaagctgagaaacgccctcttttagacatggcatgcctgtcactctcatgaactcacagggcagctgcacagcatgtgtgccatagcaaaggagaccaaggttcccacaaagatgggtagaagacctgcaagcctcaccccttgcccagtaacaagggttgtgaagcaaaatttctttctgggcattttcatcactcttattttacaagaagcagccctgggctgctctgatacaatagtcacttagacttcagggttaatgtgaagtccatggcctggtaccgggctgtgttgcacctgagctgtaagatatattttcttcaactgcaaaacgtctatgtatcccattaattatctcccattaattatctcacagacagccataatccaatactgggaaagacaggagaacgataatccttatccattagagttcagtaaaaaagacaaaataattacaaaccgattctgaatgaagtctgtgctggactctcagagtcaggcttgcctcaagttacttgtcacatgcatattggatctggctccaacaggatgaaaacaaaagacacctaaagtacagaaagaatacacagctatgtgattcgtggggagggcgcaagggtgtctgaaactgctctttacaatttagcaaatgtactctggggtaaatatcaagaagaagaaaggattttcctcttctgtctgttcccggtgtgagaaagcctctctcgcgcccttgcttaatgaaacggcgccatcgatgcctctaactcttcttccatctaatcccattaatgcagtctgttgggactctgactgggataacataggggcagtcctcagacctccagtgaatcgggtagcatttttcagtcaggcttttcactgctcggtcagaatgtgtgagaaccagctcaaaactaaagctgacgccactggtgagttgcactttttcttctgtctctgacgtttagccgtgtaaaccgttcttggatgagaaaacaaatgtttaaagactctaggcaaaataaaggcatagctacgtgtggggacaataaattgtttctgatttgggggtgtatttaataaactaatcacccaagcctaactgacactagagaagaagatgtctatacataaatatggtcatatcctgaggtgaaatactatgaacgcttgttttgatcccaaattgaattttttcatgtgccacatcatgttggtgttagattgacaatataaacatcattggagtagtatttttagctttaattttaccttttaacattgctacaattatgactgtggttacttgatttttctaaatgttattagtttgtatactatgtagaaatgtgtcacgtataagaaatcttttcaaaaaaaattgtttggtcaaatggttattaacaatatgatgaattatggggttggggagtttgtctcttacatctaatttttttgttaagtcaggacatgcttctctaagcatatggtatctcatgagtggctacttctgaatacctgttttgaaagcatgtcaaggtagaaatgacttctcgaatttttatgagcattaaattgcctcaaagagcagttgcaaacattataatataaaagatacaattgttcaaataattaaaaaaactttgcaattgttttgaaacacctactaatcaaactaaaccccacataaccattcagaactttatctttttacaactcacaaggtcttcttaaaagaaaacaggcattggttctattctatgactcaccacattcaacacctctgttcttaaagactggattggtggaggaagacctgaccaacggatttcagttctgacatcaatggagtctttaaacagctatttatccttactactgacagatttattgaggataatgttgctattgttgtttagaaattaataacagtggacatattaacgtgtatgtacttaatcctctttagttctgaatggcaattaacagtgactcactagtgaacatgcatgattctttctccctatgtattttaaaaacatacagctaccttttgttgtgaaattacataaaacatgtttgcctatgcagacacatacacacacacacacacacacacacacacacacatatatatatatatatatatatatatatataaaagagaactaggtatttttcttttaaaattttgtgaacctacaagatatattctaaattaaaggtgaagcctgaagaagatcaatctttctctagactacctggtgtcacccttagcaatctctagatctcaccaatttcttctctaatattttccccaaagacatagatatctcctgctttaaagggaatttgaatctctaagcaaatgaaacaataaaaagtcaagcatcttcctaccaaggcaatctatgctttaacatacaaatgccttagtacaaataaatagtgtgaaaaactcaagcgggggtgggggacaccatattctctctgttcagatgctatttgtagactgtcaagcatggctagaaatagccccctgtaggtaaaaacaggaacagtccaaaggaagaaatccattaaagcagaatttgaaaatcacattcattcttactactttttgtgacaataatgcagagtgatgtaactgcaggggacaagaaggtatgttctcttcttgttcaggcaccagccagcttacataaacatggagtaaagctgttgaggattatgtgagcatgctggatctgatgagctcaaaaataagatagctcggtcctatcatatttaggattatgctggtaatcgccttagagaaagtgtgcagtatcagcagaacagccccttccgcctttgaaggggatagcctgactgcaactgtgttgggcaacaggcctttgtgatatttgtcatggagtaaaactgtaagatgcaacttttagagtcatatcttatatgatcatttgacccctgcaatagtttttggtgctgtgtgcacataggaaaacttcccactggtttctctctccctctgttaaaggccacttgtgtaacagtgaactaaattcaaatatgctgacctctagcctcagaactattcttgtcactagagatgacaagaatcagggttcccttcaagtctctgattttcctccattttgagagtctactaacaagtcagggtctgctctgcaagtttgtcataacacagatatcatgatgatataactctcaattgaagatttgtgattatttagccaatgtagcattactcatgttggaaatgatgaaaacccttatagattatccaaaatataaaatcttaaaatatgaggttttgtataaagatcattggtattaacttctttccttctcccccctcctctaatttccctccctcctcatttaattaatgatcaaaactcaaattccatgtccaaactcaaatccaaatgagaatttttatattaatcaagcatgtccctgtatcattatttttttaagtattcttccccttctttggcttttgtgtttcttttcttacttgttatttttgttgttgctgttgttactttgttttttgaagacttgctgtatagaccatggtggccttgaattcatgatccttctatccccagctccaaagtgctgatactagatgtctgtagcatatgcctggctttcaagtattcctggaaaccacataatgtaagggctataccctaaaacacaacaaataataaaatacaggtttgaatcacatgaaatttccaatatcaattgatttttttgcacaaaatgtagcaattttatatgagtcaacttgatgtacaccaattaatacagataaaggaatgcatattgataattttagaaatatcttactaattactttgcatgtaatgccattaaaaaggccccctcaataagtttacctcatctggactttttttgttttgttttgtttttcaagacagtgtttctctgtagctttgcagcctctccctcccggaactcactctgtaaaccagactggcttcaaacttacagagatccacctgcctctgcttcccaagtgctaagattaaaagtgtgagccaccactctcctgccaacatttattcttataattgacttttcctctttcaacctctttccctgtccctatacattaatttcttaaaatttctctttgattccaaggtctggctcaaagccagctcagcactcgggcttctcagctctaccatgttgaagtcctcatttttctcttttccaggctcacttttcaattatctgtctgttctttgctcaggtttttaggtattctgcaaacagaatatttcttttgaagaataaatcttggttttgcatgtatctgtggtctcaaacaaatctcgattgctaaattatgaatgtgtgtgtttgtgtgtatggtggatgtatgtgcacattttcatttgtgtgcatgctccagtcgaagattgtatcaaccactcatttattttacttgtttttttatactgggcagttttgagtttcccaaatgtgtaactggaagcttgctgacttctttcacttaactttatgcactggcatcttccattgcatgtcagtgttgctaatggcttggtagctctttcacagtgccaaattatatcctactcttccactcaactattgaaatacatcttgtttcccatttggggaaaatatgtacatgttcttcgtggacaagaggaactcagctaccaaataccaaggagcacaactgctgctaagtctcacttgggatttacaaaatgtgtcacactgccttccaaaatggctttatcatcttgctttctcagcaacaaatgagagttcgtttgctccacctcctttctagcatttggtgtagctcctagtttttaagagtatagccttcctaataggtagtttgtaattcagtgatgcatgtaatacgtggcatcttttaatgtacttacttgccttgtcttttaggaagcagatcttcagatctgtggcccattcacttttaattttaggagtgagttgtatattgtaagcatatgtctattatttgacctatgtttttataatattccctccagtcctgtaacttgtatatcttcattctctcaatgcaatttggtttctaacacagaaaaggagggatttttctattttctgaagaggtgtttttcttctctcttaattaatctacagggaataaactatgcctggtcattttggtcatctatggactgttacaataaacctttctgccaaaagctgcctgagccccaccgccacgtgtgagctttacgccagccgcccgcccgagttaggcccaaataaatacacagaaacttgtattaggttcaaagctgcttggccaatgactaggattcctcatctgttagctcagtctcaattatcataaatctatatattttataagtcttatcttatcggacgccttattgacgtccctccttgccggtggatcacatcctgccgctggaggagaggcgaacaggaaaaagggacccttcctgtttctcctttgcttaaatatgagtctccttgctatgtcacttcctgcctggatcagcacttctctactacatttcccagaatcctctttgactcctagtcccgtctacttgctgtctcattggccaaacagtattttatttaacaatcaataagataaacatacacagtacattccccatcaatggacccaatttgtaattcttttcattcccccattctcctttcttgaaaaggtgctgcataaacataagactctacttcaagtgttcaactaagaaaagatttggaagagaagttctagaataagagaattttatatgccaccgaaaggataatttctgatgtcagtcaacaagcaccattcttttttttcccctctggtttaatctggagttcactgagggggtgaagctgtctggccagcaggactcaggaatagtctctgctaccccagcactgagattatgagcatgtgtcatggcattcaggacttgtacataggttctaaggagtaaaattggttcctggtgcatacgaagcaatcactttactgattaggccatctctccagcccctagaagacatttttaaagatcatgaccaaaagcaacttggggagtaaaatgtttatttggtttatgtggctttcaatcaaagtccatcattgagggaagtcagggcaggaactcaagattggaaaggaacctgaagtcaaaaaccgaagcagaaatatagaggagagctgcttactgacttgctcttcatagcttgctcagcctccttatagtatccaggaccaccagttcaggggtggcaacccccaaagcagactggcccatccacatcaattaatcaagaaaatgctccacagatttgcctataagtgttctcatggatgcattttctctgtcgagatttctctttccagataactttagcttgtgtgacattgacaaaactggctagcacagtagatgacaaacaacaagaagaaaaacacattgcttgattttcctattttcatcaaaagaaataaactttgttcaattccatttttaaaataggaaaatggtatttttaaaaaatctcagctaggcattgtgattcatgtctatatgtccagactcagaggctgatcaagggaattacaagtttgaggatacacttagctatataggaaatctaaagctagcctggactacctagtaaagaaagaaagggaggaagggagggagggacagaggaagagaaaggaccaagtaaaacaagagtttagatggagatggatgaatttgcaatgtgtttgttgcacagcatggagatttgagttccaaccatggaatccataaaggaagctaggcatggggtatgtgcttgtaatccagtgctggggcagggaaaagtgccagggagtcactgaagctcactggacaactgttatggacaaaaacaaatttttaaaaattaaaaaccctagagatattaaaacttgtattttaaaagaatacaagagtagatttaaaaatagcaataataaggattttcactcagcattcagaaaatgacctccatactataacctgtttaaaagtattgacaagaacaacactgaacttatattcagtacagtcctccccctttacacatatatcccatcttctagtagatgcttaaaataatggttactaccaagaactgtatctattgtatttttctacaaatgcatacccagtgttaattatttgactcatcactgtgaccaaataaataacataaatagtttgaggaaggaaagatttattggggttcatattttgacagaatatcagtgcaggaaaggcacagtggtggcaagtggcttcacctcaacaggtttgagaggcagtggcttgccatgtggtactatcaggaaacagagaactcaaggccctcccctgatacccacttcctccatataagtcctaactcggtataccaccaaatgaggaccaagtgttccaacacataagcccatgaggccatttcacatatctatggtagactttaattcataaagtagagaccataagatgttcactacaactaagagtaaaaaatggactgtttataatatatagatattctgacaattgatctaaaactcaagacagctactaaatgattaacaggtgtgtagaatatacagtgtgtatacagtaggcaaagatatggttccattttttttttcaagatggcatgtgacagtgccaagttgttgttgttgttgttttgctttttttttctgctcaggcagcatgcaattgaaaactttaaattgtacatttctagaattttccacaatatttttgcaatatggctgttgtcttagttaagatcttactgctgtgaacagacaccatgaccacagaccacagcaaccattataaacgaaagcatttaactggggctggcttacagtttcagaagtttagtccattgttgtcatagcaggaaacatggcagtgtacagcagacttgatgctgtagaaggagctcagaattctacatctacatctttgaaacctcaaagaccaccccctagtaacatacttcctccaacaaagacacacctactccagcaaggccacacctcctaatcatgccattccttgggaaccaagtattcaaacacatgtccttgagtaactgaagtaatgaaaagtactctgtggggtaagagagaatttctgtaattgtttttattcttttgtgctaattgctattgttatttgttggttttgttatctgtttcttttgtttctgtcctttaatcagaataacaagaagctctatgtgggtaattataatctgctacataaaaggcaaaccagtctgttacgataaatctttccgccaaaagccactgagctccaccgccacgtgtgagctttacactagccgcccgccagagttaggcccaaataaatacacagaaacttgtattgggttcaaagctgcttggccaatgactaggattcctcatctgttagctcagtctcaattatcataaatctatatattttataagacttgtcatatcggatgccttattgacgtccctccttgccggtggatcacatcctgccgctggaggagaggcgaacgggaaaaagggacccttcctgtttctccttcgcttaaatatgagtctccttgctatgtcacttcctgcctggatcagcacttctctactacatttcccagaatcctctttgaatcctagttccgtctaacttgctgtctcattggccaaacagtattttatttaacaatcaataagataaacatacacagtaatacattccccatcaccagtccctgtgtgatccccttacaactctcccttaaaaataaaaatcactctgccattgtcatgcatccatatcatttcttaatctagtttccagtaacatgaagtgtaaggaattgtaaaaatataaaacaaaacctatccctaagtcatttaagaggtatttatcaaccaaatggaagaagagtctgttactggagatttcttgtcccaccaggtcccactgctcctctcagccacaaagaaacacacaaacactatataaattataaaaacattggtctagggcttcataccagcttgctctgtcttaagtattaacccatttctataaatcatgtatcatggtcttggcttactgcagaatgcccagacctgctactccttttcagccacatggcatctcctcatagtccctctcttcctacctttcccagaattctcctagtctcctagtcccgcctatcttcctgcctctattggccaaacagtttttattcatcaactaataagagaaacatatatacagaaggacatgccccatcaagagtccacctcccagagaattagaatagagttcaaggaggcagatgtgaggatgttctagtagaaattcaagttctctgaatcccataagcatgacaccatctagcatgacatagggtacacattccagaccctgtgtgcaccacccactctgaccacccatccttaaggctattgtctggttaatttcagagtggaaatgagtctttttgtttgtttgcttgttttgttgttgttttggggttttttgttgttgttttaccctgtttgatatgtttttatttaaattagaaacaatcttactttacatatcaatcccagttccctctccctcccatcctcccatgcctcctactatccctccacccccatcccactccccatccactccccagtgagagtggggtcttccatgggggatcatcaaagcctgtcacatcatttggggcagggcctaggccctctcccatgtgtctaggctgagagagtatccctctatggaggaatgggttcccaaagttcattcgtgcactaggaaaaaatactggtttcactgcaagaggccccatagactgcccaggcctcctgtcagccaagtagaactgagtcttttttttttttttcttttttcttttcttttattttattagttcaaattaggaacaagcttgcttcacatgtcaatctcttctccccctccctcctctcctccccaacatcccacctgcccctagccatccccactcctctccccaggcagggtaaggcactcaaaaggggctccccaaagtctaccacatcatcctgggccaggcctaggatgtagaattaccccatgtgttcaggaagtagaactaagtcttaaacatgcctccatcattataatcctttgggttgacttgtcatgtgaccgcagaagatttcacactaaagaggtggatacttaaaggtctgtcagggatagaggggacgagcacatagatttttaacttggatttgtcacagatggtagatgagatacaatttgggcagatgacataagacatgggctactgagaccatctgcaaaaggatttttaaccaaaatagtcatctttattggaaatttttacatgtgtaaattgtgtttcacaccgacattaagagagttaattgctctgtccacttttagcttaactgcaaagttatgggaaacagaaactaacaggcaagcccagcacccaggggtacagcctgtgttgtgtagggaacccagagctcagcctgctagatgcatcagaaaacaaaagacactgtcaaaacatgatcccaaagccagaaaactcagttactggttgtttcctacccaattgaccttacccagggttttgtgcctttcaggtggtttgcatggtagagaaaattactatctagtagattgattcatttaattcttaaaaaccttattagatcaaaaccaccaggagcctcatccaaaatatattactctgacaattctgaaaattctgtttcttttttcacaccaaatatgataaatcagtaattcctaaaaccttttttcagaaaaataacagtatgtcacatctatccctcttttatactgaaaaataaaaggaagtctgggactacagttttgagtccatttagacaacatagaaaacaaaaggcaagggttggggagatgactccattgataaggtgattgctatacagcatgggtacctgggttcagatctctagcacccatggaaacgctgagcacagtagaggcacacattcccagttatgcaaaataggaaccggcagatgtgggaacttgctggtcagccagtttagctgcaggttcagtaaaaatccctacctcaaaaaaacaaaaaacaaaaaacaaaaaaatgtggaaagcaagaaagtaagacactgttgacttcagtcttttacatgcaaatgcatttgtgtggacacccacacatacattgaccatacatgcataccacacacacacacacacacacacacacacacacacacacaaagaagcagagccttacccttgctgcaacatagaatgcccagaatataaaaatggccaggctgggagttgggagacttggataagtaggaatggaaagcttcaagattatgtacagtaaaatgcaccactacccccaagcataaagtacctggcaggctcaacatcactgccttcctgagggatgctttttaagagtcaaagtatttttctgagccattttctggttaactcattagcctgaattggttttctgaccttaacacctgctgtaaccagcaggggcttgaatggggcagaactaaagaggtgcatatttcaataagcaggaaaaactgagacaaagatttcctgcaaagttggccaggagtctctgggcaaggaaaaggcaagagggacttaataaactgcacaaaataaaaactgagtaaaatttctctatctctcaggccattctagatcctctaaatttgtttctcaatgagttttgcactgaaaacttgatgatagatagatagatagatagatagatagatagatagatagatgatagagacagatgatagatagatagatagatagatagatagatagatagatagatagatagatggatagatgataggcagacagatgacaaacaggcagcagacaggcagatgataggtagatagatgatcgatggatagatggatggatagatagatagatagatagatagatagatagatagatagatagatagatagatagataaatagatgataataaatctccatgagtcaaggaaaagtgccaaagaccaaccctcctcagtttcctcctcctatctttcttgtaatagctggtgagatccaagcatccacatccccctatgctcagcttgaagcaatgatagagaacatggtactaggtctgcacagtgcagttccaagggaggccaagtagttgcccttagctagacacttgtaaacagcaagcactgagcaatgatgtagtctagtatcctaggtggtgtctgaaagcctggcttgaagatatgctgtacgcagtataaactgtaaagctgcagctcaaaaatgggattttaatgaggaaaaagaaagtagctagtactttaaatgattcggacttattttcacttctaataaacctcagacttttcctgccaaaagaaaaacagccataagatttctagatgagaactttttctcccacataataacacatatatacattataggtggcttctttctctttaaaaatgctattaaaatgtttgtagctctacaggattacatgtagagccaaggttatgaatatgtataaatatgcagatgctctattgaatgttccttatctcatttgtatttctgaagatgtataagataacctttgtgtctttcaaaagcatcttcctacacctcagggagcaaattacctctattttcatttcctttaaagttagatcattttataattaagaatgtattgaagcagattctccaacatgtaagctactccctggggagtaatttatgcaaagagagtttctgacttaatatcatataagccaaaaactattcaatagctacctgggattattttagtcatttatagtaactataaataacccactgtttgaaatgctattgttaaactgaaatccatagtacaaattaagtcatagtgtgattcactgaattatttttaaaatatatttaataaagatgcaataatacatcaaattgtgcttcttttccaaaatcattagaacaaaaatcagttaatgggtatggtgatggtggtgatgttgatggcaatgatacaatgataaccttgttcagaaaatacccattttgtcctcacaattctatgaagtttgttgattaatactatatttataagtgacaaaatgtgagttcagaagttttatcttagctatgaccctaattaatacattaagaaaagcaacctaggaggtcaaataagaataaagccaaacctcctatatccccatccccaaatcctgaaatcactccagtcattttgacatctcatccccaaatccctgccttaaacttttcatcttacaaaagagagagagagaccattcaaatttctgtagcttatttaatttttaaaaacttaaatgtgttatcctaaggctaagtattacgtttgttatggaaagtaataacaaaaggtggtaatgctttccacttatttgttttgtctatctgaaagtagaaaactatagcaccgtatgcaagtgtcagctttatgtacaaagcattttgaaggatattttgcataattattttaaattgggaaaggaaatagcagatctttctagtgtgaataattttaacaactctttagagtactatcaaacacaggaattgctgcattctaaatacataacctacaggatgacaaaacggtccttctaagacattatgcattcaggtgcctgtgagacaccacagaaaagtgcatgtgtcccagtcccacaccacaccgtactccataaatgtccccgtttctgttccaagtccaaacctaactctcatgcatgctagacaagtgctcaccacccagccacatccttagcctcaatgtcaccatttcagtcagtcctatcactttgtctcacttccagttcttaatcagcttcccttttccttatctttcagcgtttaatctcacctctgcctctgaaccacttttgtacttgcttcttcccctcccttggtcctactatacttcctatgctgccaccacctaagtctggtcaagaatgccctttcattggtcctctgcttttctctggctagcttgccagactctgaggttctcccttcacatctcatgtaggggttggttggggactgcatttaggattttgctcacactgggcgtgaactctaacatggagctacatatagacttcttttcaccatttatttacccttcattttgtccattcctcgtggcaaataggatcaggcaaaactcccctgcctaactccagcaattccaaattctggtgtcacatttctatgcagtcatgtgacccaaatttcccttaaagccaattgctctgtatgatagtcagccacagtcatacgtgacctctgacctgttttcattcaatgccccttgtcattctcttcaacctaaccaaattccacacaatctgcaaaatgaactgtcttcccgattagacctgcagtaatctggagtgattggaatgttgcctgtccagaggtaattatcctatcttatgctagctttggccccctggatacccattctttttgcaccactgtgtcagaactaacatcctaagactaatagataaaactccattaatttagcagaccactagcttccactaacctgaaagctcaaactgtcatcaggcagcatctgagacccatagaaaagcttcccccatcttgctgtggccacctctctgatgtacctatcaatatatttccaacttgccctgatttatgactttctttgttctgtagaacaaactatagaactttatgaaactcttaacacatttcaacattggatttgggataacctaaacctatgacctgggtcatggtcactctaatatgccccaaaaaacattatactgtttaaaaaacagtataagaaacctcttcattcccagtgaagttaaatgcatgttaatttcatatataactttttctgatttcttcattattaactttttattcatgagactatcaagatcattaccatatcttctcttgagtcatcatgtttcagtatctttgcaaacattaaagtgtgctcagttactgtttggttgattcatttacagtattttcacagagatgaccagtccatccagctacacaacatgtaacatcaccatatacaacactccagtcttgttttatgtagttatttaaaatattattgagataagaccatgtaaaaactcccaaagacctcctatttcaaatgtaagatcagaaatggaaaggcttgagttcacaggttttttctgtcatgttattttaaggaagacaagctttaaaagggaaaaaaaacgttgaaagcaggagcaaacatctggtctctaaacatgcatatgtgtgagcgtgtgtgtgtggggggggtctgtctgtctgtctgtctgtctgtctgtctgtgttaaattcagtttgaaaaacaaagagtgataagtggatgtcttttcctaacagtaattctcaatatgtgggtaatgacccctttggggttggacaaccctatcacagagatcccctaagaccatcagaaaactcaaattattcataaccatggcaaaattacaattatggtgtagtaatgaaaataattttatggttggagtcaccacaacacaaggaaccatagtaaagggtcccagattcatgaaggttgaggaccactgccttagaagaaggttaggaaggccattcaaatagtaatgatgaccccaaaccatcactctcatccagcatcttctgttaacatctaatacaaatatcttggcaagaataggtaagtctgaacatagaaacaagaataagaaaagaagacaattatggacattcaaaatgccttttttttttattctttcagcacaaattgaagtgataccatgcaaaatttgtggcgataaatcctctgggatccactacggagtcatcacgtgtgaaggttgcaaggtagggacttctatattgtggtcacttgctgaggctttaaagaagacatacactgagggatgtttgtgcctgctgctgacattggctgaagagatgcctcataggttaagaacaggagttgctcttctagaggacctgagctcacttcccagccccacaaaatggttcatagccatgtgcaactccagtccaagggtatctgatactctcctatgacctccttgggtactgcacacacatagtatacagacatacatgcaggcaaaacactcagacacttaaagtataaaaatagtaatacaaaattttaaaacactgggcgttataaatagactctagatcagtccaaagtcgtcctcacccaaatcttaatttttcaatgagttcctgaagtataaacaagatcttactttgatatatgccactgatctagatatgaaaaagaaactggccaaaagcacaaaactttttttcacattctgtccagattccatcaacccattgacaaacacattcctgtgagtagggtgtttggaaaatacaggactaagggagtagtcctgagataatcaaaatctgaaaattaagaataagtagtctaaacgaaagaaaaagtgagactagcaagtggcactcaaaacagttctacaatatgttttaaagggatgggcataaccagaacaaactcatgtgccatatgtaggggaaacagtagatgctggcaatatgcagacaaggtgaatcatttgtttgagttcagtaaactgagaaagacgcagcatagccatggactctaggattcaatcagaatcttaggagacttttaaatgtaaacaggataaaacagattataactgccaaaatagcactactcttcaaaaattgatggtggcttcacaagtctcagaaaatgtagtacttgacactggaaaagtagaaaataatatcaaaagaaataagtgaagatgatatgagaaaagaaaaatcaacatagtggaaggatctggaatggagatgatccataggtaaagctgaaaagatggccctttattttattcctctacaaagctagaattaagagtgatgtatcacccactatcatgtcaatttttagttccatcaatgagaaacaataaagcaaataagaagttggctgcttcttaagatactttctctgggtaggaagacaaatagcttttgtcataagcattagtaagtttgtactgagagctctttctcgtgaaggcatttctacaagcttgttctgaaggtttaagagccctagtctagtttacaacatatccacttaagttgtttgtatatgaatgctgcatgctcattatttcatcatataaggcatttggaaaatgtcagacttcaagctgcagagatatagtcatgttaagaagcaattttgaaccataaactcttaaatattggataaacataacccaacatgtcaacagcaggaacaagtggttagactcctgtcatcttttcaatccgtcgtcaaagaaattatgcagtcactaggaagcatattctggggtttttgtcaaactggctacacatcacatgacttttatttatttcatgaaagaacccacatgtataaatatgttacaagtttctccagtagaaatcccattcaaaatcagatgtcaatgtcagcacgttcaactatcaacctccctgagttattataattatgctccggagtcaacatacacaaccattttaaacatcaattcagctcacaaagttattcagttcctattcattcagtaaaatgtgaagcagaatttatttttcatgccaaaaatctcatttgcaataatgagcaacagataagcaagaaatgactcataattaatgtcaaattggctgtaaattagggcttgtggctgtgacttcagaacatcttccctgccaactcttttactaagtggcactccagtatccaaagataaaatccatgtgattcttcttagaaggtaaattccaaggcgcctgtaatcagcaccaggacactgcaatgacgcttcctcacagctatcttagtatataacacagacgtttcagcccctggggacttagatgtgatcctgtttccagaatccaatcaaattgaattcatggagctttattgtgcaatcaccagtgtagtgaacaagcaccacaagtgaagatgtaggggtgaaccttcttgagtggatctgtgcttaaaccacaaaaccaactggaatctctctccaaggggtcgttggccacacggccatcctaaggttccttttggccagcaaagccacttcaccgtgccaaactaagcaatactgaaatccaagacaaaaccaaaatcaatagtatcaatcctatctttctttaagctgttaagagctttcacactgatactgatttttaacacttcattgaaacattcccttttcctaaagcctttatttttaatcaactataaatttcacatccaagttggtctttttgcatgctttatttcatctgcttcattctcctgaggaaacatgggtgtttgaaagaactttggggctctatttcaatcctcttggaggttttttacttccaagaggtaaagttaaagggctatctttctctgtgattctttgtaatacttctatttagaccatcacttttctggtggcacttttccctttcactgttttgctgtaggcatttcgagagtaagcagtgattggggaaactgattacctgggggaatgaacagagaatgctaactgtcatgtctctgggggagatgtttagttttccttactatgttttcttcataaggaaactaagggaggttggtatccaaagaattaaaaataacaagaaacccagctacagatgtcaagcggccatgtgcagtcagttgtagctcttctacaccagaagaacctaaaccaacatgaaataagaacttatatcctataacctaaaagcaggcatttgtttattgcctgttttataccaaagaaatcatacttagaatttctttgactcaaatggatttatgataagatataccacaggtttcaaaagcaacttgctgcacaatgtgatggtgtataatcccagcactgaggaggcagagacaggcagatctctatgagttcaagtccaacctggtatacaaagccagttccaggacagccagaaataccaaagttgcatggtaaggctctgcctcaataaataaataaataaataaaataaataaataaataaataaataagagcgagaaagaaagaaagaaagaaagagagagagacagagagagagagggagagagagagagaggcattaacactttctggacaatggtttttttttcagatttggaaagacattttagaatgtaggcaaaatggggctaatgctgagcccacactcctttgacgctgtgcctcctaccaatacccacagccttagttcaaacccaagcccatgtctccaccagactttgacatgcctctttgatgttccttctctgttgttcctttggggtagaactttttctctcaaagaaattctttcagtaaatattgaatgaatgaatgaatgaatgaatgaatgaagaatgaactaacaaacgaacgaacaattgaagacagatgatatcgcatgtccataaatacgcccatatattctgctcagaattatctataagctctccaagaagcactcaagaacttttgaaagattaaactcagttatactccttgtataaagtctatcagtgtatatgctaatgttgccctttctctgagtctcctgccctcgctttctcttttcgtctctagggattcttcaggaggagccagcagaacaatgcctcttactcctgcccaaggcagagaaactgtttaattgacagaaccaacaggaaccgttgccaacactgccgactgcagaagtgtcttgccctaggaatgtcaagagatggtaaggctctgccttcctatttcttagagttttcaaatggatgtttggctagaggctattcaagccactgaaagagttttaactgtgggagttggggatatgaagaaaagaaaaccagagtgctggtcatgaattaagaaataaagcaggaacatatcaaatgtagaactgcctgagaaataagaagaaaaaggagggtaatggaggtttggagagcagcctatgctatctaggttaagtgaagaccaggttaaggctagatagcacatgactacctggccatattttctgggaaagagggctttcctgggatgtgagactttcagggctaaagttagaaagccctaggttaagagaagccatgcactcaccagagctgtctgatgtatacagtcacttagtgtatggacatactaggagcagaacatgtctccctgggaagtgaggctactcactacctgttaataaatgcccagtgagagacctggactattctgataacgaagagggcacatgcattcaggggccctgtgtttccactcattagatgatagagtgtgtgtttctcctccacacacaaccaattgcttagattcatgatgcaagatgaaaagttcaagcatggtaaacaaagaattgtgcttcttttttttttttcactcttagtctttcacacacattcttatactataaacattagccccggctttcttatggcagcattctgtgttataaatggcctagtatcatgagcaaatcccactagcatcggggctgatagggatttatctgttccagtaagtgatggtaacagatggtactgaagagccctaaagttctacagctatggtttttcattttgtctaatcaggacttgagaatgagcagtgtagtatcacctaccacttattgtttaatttttattttaattagaaagaagattatttcacatgtcaatcccaggtccctctccctcccctccccccccccaactaacaccctacctatcccataccttttctgctccccagggagggtgaggccttccgtagggggtcttcagagtctgtcatatcctttgggatagggcctaggcccatcccgtgtgtctaggctcagggagtatccttccttttcagatgggctcccaaagttcattcctatgctaggggtaagtactgatccactacaaggggccccatagatttctgaggtctcctcactgacacccacattcaagggtcagccccatgctggtttctcagctatcagtctggggaccaagagctctcccttgttcaggtcagttgtttctgtgggtttcaccagcctggtatgaacccctttgctcatcggtcctccttctctgcaattggatttcagttcagttcaaggtttaactgtgggtgtctgcttctacttccatcagctgctggatgaaagctatgaattaggcatatgaattagtcatcaatctcattatcaggggagagcatttaaggtagcctctcctctgttgcttagattgttagctggtgtcatctttgtagctctccagacatttccctagtgcctgatttctctgtaaacctaaaatgtctccctctattatggtatctccattcttgttatcttctattctttccctgactcaacctttctgctccctcatgtcctctgcatccctcctcttctccccttctcattctcctagctccctcccccctcttcccgtgctctcaatttgctcaggggatcttgtccctggcctcttctccaggggaccatgtatgtctctcttagggtcctccttgtttcctagcttctctgacagtgtggattgtaggctggtaatcctttactctatgtctaaaatccacatattcccaactactgactcagcaaatcctagcaaaatgctttagcagtagtacaggagccagggtaagatgtcctcacacctccctcaatgatgcagtagtgtcttcactgtggtacacacacttgctgtctgccacttacgtgtggctcttacttcaccacatctggtcactggaacatcgtggctgctggcaaacagattccttactattcaaatcattggctttctatcctttcctgcattatatgagcagacatcaaactcgagggttacaaatttactcaaatctaccttgtcaaagaaataaagaaaaacgaatgcatcttaaataatgcatacatactcctgtgctgcaaagtggcaaaagtgcgtaggagtagataccacatatcttgaattttctccttcctgatgtatattcattctgtttgttattttggttggttgcttgactattgaaatagagtcccagtctattgtccaggctggcttcagactccaggctgtgtagacaaggatggtcttcgtgcctcaccctcccgagtcctgggattacaggcctgtgcccccatgcctggcttctgattttctgttaactgagctctacaaatcaaccctcagaggaactatttggagagaaatgagtagactgaatcagacttctaatacaaagtttagatccctaaaggtgctagcttatctccaacactgaaagaggtaaactgggacaggtttgactagtacaaagcaggtagaaacctatagacttggagacttaaagacagtaagaagacaatttctaaatgaccccagagtcacatgtgatgtttatgcagctggagtctccaaatcacctgttcggggctttgttgactcgccactggagaccttaccctttctgaggagtggatgggggtgaggagagcagcaggaggtgggcagggaggggaatctgtggttggtatgtaaaatgaattaaatttaaaagaacaaacctattcagttctcgagcagcaggaagtagaaatcttttgatggagcaatgactttttaattccaatcaccctgaaaacatctcttctacttagaatcccatactgtagacaacagtgacatgatttctggccctcctacacagaagtgtcctttgctagtgtgaggctgaagtgagggttaaacatgtattagatattgatgctgtcatcctggttatttgtaaatctcttgcaatgtatacagaatcatgctggtttttcttaagacacggcagtttaacaaaaaaaaaaaactgtctctatacgcaagtgaatgtcattagcagaataaatcaggtttaagagaggcaagaggctaaaagagtgctgtgctcactcatgaggagtgatgaaaagcatgcaaatacttgaaaatataacagtagatggcctttgttaacgtgagctttgaatacatcaaggtgcttgcagataatagccaggaatatttctatgtcagaaacgttccataggtgtattttcagggtgtactgtacattttcccccagagtatatcatcagctttattgtaggagaggacataaaactgaaacactcttctgaaataaatggaaaacttgtcctggagtagctctgtagtcagtgcctataaagtctttgatttaaaacaaagcctgagaattccaaactgtaggctctttaagctgcctctttctagatattccaattgctctgtcacctaacaagtgagccttgtacaaaagatgtacatttttctgtcaagtcttcagatgattacagcagagcccttggcaacatacttttccaacatcattagctctaattacaaggactatggttaacagcacacggaggcatgctttggctgcaggtcagtctatgaccctgctgatggtggatggccttgcttgggtgatagaagaggcctgaatcagctttgcatatcctgttgttcagcaatctagttcaggcatgtccttgccatggtgatgtacccaatcaagcaggcccttttcaggtttctgcttgtcacacatttgtcaataacccattgacctaggcaggtcatgtgactgggagtccagggttgggctacaggcctgcacagaatgaaagggaattgggaatagacatggggaacataaaagggtacaggtaaaaggaattggtgtcactatcactctgcctcaaaatacatagaaatctgacttgagggttaaatggctagtatttttttaaaggcagttctgatcccatgaagaaaactgactcactcttgttttttttttaagattttatttatttattatgtatacaacatgctgcttccatgtatatctgcacaccagaaaaggtcacaagatctcataatggatggttgtgagctaccatgtggttgctgggaattgaactcaggacccctggaagagcagtcggtgctcttaacctctgagccatctctccagcccattcattcttgatttttaattcctatgacttaaacctataaatgcacactgttctataaagttactacaaaatcttaatcttgtggaatagagtcagtgcttgcaatgagaagactgtagctgtcataagaaccgtctgcgctgacccccgtgcaaaggagcaaaggtcaacaatagagaagatgagcaccactttcttgggactcagtcctgccaagtcagtgccgaatattatttaattttccttataaaaatggcattgttcctctagagaacaaaatgtaagttatttgtaataacataatataaaagtacaaggaaaagtttccctaaccatccagtagaattctgtccatggtcaaacggaaataccactgcaatccaaaaacaaattctgagaagcagagtctctaacaacagcagcgactatgcagcaagttaaatacaacacaataatctaaaccaattcaacgcccaggaaaagcaacaactgacagggaaaaggagagtttgctagtagttaattagattgtttctcttcattgaggaaaactacaggataattactgcttcatcttcctacttaagcagcacggagaagccagggcacaggaattatctttgagaaagattaaggagtaagaagaaagaggggaggcctgcgggtgttaaagtccagccagtcatagcttcaatctggcaggcaagagtagagaaaacatgccactatacctaggagtatctgaacacccctgtcagcctgcagagcctgttatccagaacttagtcacacagtcacactgctcagttatcagggctgggaagtttggtccctattttgaacaagccatactcaaataagatttgctagcaccattcccaatgcaaggggaagatggatttggatgaatgctgtagggagtgaatggcagcatcctcaagatacaggcctcctctgtcgaccctctgagctggagagcctgcaagcgcttccagtgtgtgcctcctctctacaccctctgagatcctgacatcaaaaaccatggggacacttgcaccaccaccaaagaaaagaaatcagaaactcagatgagcatctccaagactaccatagtccccaccattgatatgaggtacagaatgcaagatgagttgaaccaggagtccagtacccaacatgcccaggtgctaaaagagaggttgacagcttgtgagaaagaagtcactatccataacagttcaggaggtggtgtgccacaggtcaggaagctgtgcatggggatgaaagcttctttatattattcccagacactcagggagcctctccctcagtttccccctaaatacctgaggatttggctgccaaaaagggcaaaataaaccttcagtccagaatgataatggaagttgctcttgctggttcacttgccatgagtgtatataaatgccactatccaaaggttatcatttgctccaaaatccaaaatggtggcaactcatgaggtttttcacaccccctgaatccttggtcttaccaattaaaaaaagatatgtcccaaactgaagcaatgggcttcttcctgggggtctggtaatcctaatgatagggaagaaagtcagtattgattatggaggccattttaatagcaggaaacctttgctagtatcataagttttattgtttgggttttgaatatgctgttcacaaatggagagagagagagagggatgaataatacatcttccaattccatagggatgacaaataatacacatttttacatttcttcctagcttactgttagtgtttaggtattgaatgcccccccaaaggtcgatatcttaacataaattaaggatgtggaccccaccgttgagaggctgtagaacctttagaaggtggggcctaggagagaggccttaagtcactagggagcatccgtctgaaggaaatactggaacctcagccccttccttttcctctcttttgcttgcttgggttgaattgctctaccacacattctctaacatagtgtcctactgtgccagtggcacaaaagtcgttaatactgtgagccacaaataaacttttctacttctaagttgatcatctcagtgagagtagcagaaagctggacaacacacagatttcatcactctgaggcaagctaacacaccctccaaatataatatttccctaaatgtgaaatctaaatgagtgaaggcctggtttgtagcaatagggatttgtctatatgatactgaagggacaaccacccatgtcccttagagtgaaatggctaaagataatggtaaccacactgctgtcttttgctcttgtctccatcccagctgtaaagttcgggaggatgtccaagaagcagcgggacagcctgtacgctgaggtgcagaagcaccagcagcggctgcaggagcagcggcagcagcagagtggggaggcagaggcccttgccagggtgtacagcagcagcatcagcaacggcctcagcaacctgaacactgagagcggcggcacctacgccaacgggcacgtcattgacttgccgaaatccgagggatattacaacatagattctggtcagccatcgcccgatcagtcaggactggacatgactggaatcaaacagataaagcaagaacctatctatgacctcacatccgtacccaacttgtttacctatagctctttcaacaacgggcagttagctccggggataacaatgactgagatcggtgagtatgaatcttctctgggttttatttctggaaggttctctcttgaaggtgccttagtcctgcttagtaaaggcacccttacagctctaaattaaattgcatgcatacctggtttctactgagcaaatgaaattggcttagactctaacaattgtcactatccccttgccccataaaagttattttgagtgaaggaagaaggaacaaatagaaagatgctatctacaagggaagaatggatgctctcagtgaatttggattcttatagaagaaaaaatgttggtgggagcaaaaaaatttcctagctttccaaaataatgttattcatagagaagtggccacaataaggagcaatacaatgaatatgtgtctcaaagatggctgtaggcacaccttaagcacaaagtactgcttccctctttgtgaaggtgaagcaggcagcccaaaagatagctatgaattttacgaaactaaattcaagaatttgacatgaggatcctagggcgagcactcacacacaagggctgaagtttaatccccagaatcgatgtttttttaaaaacatgttaccccccttaataatctcagcactgagaaggactcctgggctctttggccagccagcctagattacttgagctctgagccagagacagagcctatcccaaaataacaaagtggacagcccctgagaagcaacagtcaaggttgtcccacatacatggagatacacacatgtgcatgtacacacatgaaatttacatgggattctgaatcacagcaataagacttatggtcttgaaggctgtgcaatacagagtaacaagttaatcatgagcatcttttagctatgatgacttttgacctgttagtgcacaatctcaggggtgccccatctcaggcaagccctcttctgatctacagtaattttgtttcaccctgttaaacttgacagtctaatgttaatctcaataaaggactgccacaaaaatagcagcaaactctctcaatacatttccctcccaggcagcagagctacatgtccacctcacggtggagaacttagagcaaaagcagaaatgactgtttcgaggctagggggcaggcaacctgagttctaatcctggctctgtagattataacagggagttccttgaccccatatctctaatctttgaagaggacaaagcatggttttagggcagggggatattataaggacaacatcaacaaggacccaccaagttctccactatgcttacttttataagccctgtgcttagttgccatcagataagtgtctggatcccatagctttttcatttgaatttgctgggaacatataatgaaatctatggctgtgttctaggctgcttatgacgtgtctgatgaagaagcaatgacacacaatgataaacctgagatgttacttttccatttcagtggctcatcatgtggcagaaaatgaaattgttaatatcccagccaggaggcaccaatatctggactctgactagtccactgtattgctatctttacccacatccttactgtaacagaaatattttcaaacattttgatttcataaaagtctaaagagtaaaaacaaaaatcctattttactgcagaaacagggagctacaaaggcctagggcagctcactgatagagcccaagcgtctacttcaggatgcctgattccagggtcttgtgctcacccagttacctgctgcttgctgtattcacaactcatagggatagcctttgtatgcagaggccccgcaatcttgccaaaaagctgtgccaaaacaaagtaaggtactacttaatatacaagttcttgagtgtagtattggttaggagcatacattcaaatcccagtgaaatgaaaactggaaattacttagcaatctaggcctcatacacaaaacgaagcattcacagtttatttatgacttttcatcaatagaaattatgataagaaagctgcagaccaaaccattggctctaggctcctgtggacagtggacaggcactttccctttctggccctcagtctgtttttctatgagctgatagacaagaactgggtaactgtacatctcgtcagagcttcctgcagaggcactgacacccaaagagaacttttcataatcatttcaagacatcactagtctctacagatctctacatgtgctctaaattttcatcagactttgagggtgaaattagaagtgtcctgtgagtactctcaaatataacagactgttaaacatgggctctgttcagattttgctaaaacagcaatgccacctagtggacacaatcccattccaagtgtatagatctcagtgtatgtagttacaaggctatgcacagtagggtgatgaatgccttgtcttaatgagttatctaaagcttgccatccatgtcactataccactaagttcataacagcatcattctgccagaaggcagcagagaatggttctgtactctggtttgcagtcaagctgcaatcttttccttgatgtctgtgtgtcttagttctaaagcaggatcagtaatagtcattgcgcttatgtcagggagagaaatgagttgatacttataacttctaaagcagttaattgccatttctaagaattatcattaacatggtaagatcactattgtgattattatacaagatccctagctgctataggcagtacctttaagtatccattgttttaaatgatatcctatctttaatttttataaaagtcttgactggtgaataactgtatataaattttatagaagaaaatactgaggctagtggtcacattcttagtaaaaccagagaacaaatttgagtctagatctaagtaataaaaagccattctttcagtgtattatagtgtattttctcctgtcaaacgataaccactcagaagctcattggtattgctacagaaaagcacgtttagcacttgatgcctgctgacatcattctacatgacactacataaagttcacagggttttctgctgaccttttgacttgatttgatcattaggcatctgaaccacttggttggtggcatgttgtcattgaaaaagtccagtacagacaaaagagaaaatctgagcctagccacattttaaatggtgaattcaaggctctggaaaataagaaatttgtgagcatcgctcatggttactggttctgactgcttcctctggtttctgaaagggtaagggacatgaagtcctgccattgtactgagatggggtccttatgaggagagctttcatttaaaccaagttttagatgagcctgtgttcaacaagatcttgcagctttgaaatctttaataaaaatgcatttgtgaattacaacataatattttgaacaactgcatatatgtcatcaagtcaattatatgtgttatcaaagtcaggaataagcccaaaccaagtcaacctttctccagaggtgccagaggaactcacttcctgggagaagggatgcagatgataatagcttctgtctagatggaaatgtgacaatcttttcacatgtgtcagtaagcatgaggctcaccccctgctgcaggtcaactgtgaggaaacctctaaatgaggttaagggtcagaaaaaggagtttgttttccacagcacagagttagctaaccagtaaagctaaccagtaattctaacttaagcaattcattttgctatcatagacttccaggcacgctttgaagaatttctttttgcaaaattccagtcattgtaaatgagcaaaaacgtggtttctactctcaccatccaagtgacagatgtcaaaagaaataattaccattcagaaaagaatagactggccatcagcagcaaggcagccttgcataagacccttaattcaatccaagcatgctaaactaagtaacttaagtttttaaactgtcgtggaacctaagtcctaagtgatcctgcccatgaaggtctgggagatggtgaatatccgttactcagacctattcttatcaggagactttttgttctcagaattttgaggctgaaaagcaaaatacagttaagagaacagaaacaatgaaggatatttcagaaatatatccctgggctgttcaactcccaagagaaaaagaaaccatgaaataagaagaggctggaagtcaaccacaaattaatatttaggcctcagtattgacagggcttggctgggaatttacttcaagctggcgtgatggatgcattgtgtctctgggaataaaatgctgtgtggttggtggtagagaagggaggttaggcaaaggattctcagcaagtgagccggaaaaataagaacagaaccattggcttctgcttaccaccacatctctctgatgctcaggggatgctgcagggattatcctcttaagaaagctcgtttaagctgaaagatgattgacactgtatctagaaggttccagacaagacaattcaaggagccaaaggacatttttaaaagttgaaagaaagaagaatgaatatatacatatatatacacacatacatatggatatatatgtatatacatctttaaattggctgcaatgctgagaggcatggtatgtcttccatgcctattgcctggaatattttgcagaggcatttccctccagatatagacaagggaatgtggactcactggtctcattgttcccacatagtgttaaaatgggtttattctcatagtccttttgtgttctattcatggaatctggagttttaaataacaaacatagatataaacctcattttggatgtgtctattgcataaccaagcatgaacagaggagactacataaggagatgggcctaaagtgatctagtctctgtaatgtagcgcttcatactgttaaagctacagagacagtcaaaggatattgctcagcgtgctttattttgtaaaatttttctggacattttaaatgttctagacattttaaaaatttaagaactctgagtagatgctatggagttaaagcagctcctttcaatggtgtggacttctataagtaagtattttataaccgctgctatttcacttcctgtgggggagtgatacagagaacacaagctgcagcttgtgaagtatctatgtcctctgctagcacctgtacaagtacaagcaacattcagtttagagttacagtctgacgggtcattagcaccaataggagactaagtctatgaggaaagcattcaagtgttctgcagaaaggtaaacccagacggccttggtttatcctttcttggcttgaaggtctatcttgtaaacgtcctctaaccccctctcacactcactccagcaacagagtctgcaggcatttagagaaagtacactgagatttgaaatcacaggtccgcctactatccgtgtgggcttgttccaaatgttcagcattctgagtctcagtctcccattctgcaaaggaaggcaactggacaaaatgacctcaaaagaccatgcttttctcacctttcagagagctttggcagtgcgcacacagtcaacccttgtttcagccacaacaatgggaagagcacagaagaatggtaagagaggacttgtgagtgggccctgtgcaatccatagcagtgctatggctgtgccagtagccagcaagtctctcctaagagcccagaaagccttcctctaggcttgtacttggtgctgtgaccaccatgaaatcacagacaagcaccacttgcttctccccatctgctgccccccccaaacatatataactaagtaaataatagccaaatgaaagtcagggacaaaaagacatgtctgagggtgtggttggtgtggccagtccccaaacccttgtgtttatatacaatggaagtacaactgtgagcagctataaagaggcagcttcaggaaaaatgcacctgtcctcacaggtccactccaggagggtcattcccaagcttcttttgaggggaaaacaaatatgatcatggagtgaaagcctgttcttgactactgaagagtgccacctgggccagtcactgaaaagagatgtacgtgcccctatgatactttaacatcagcatgctctttcatcactcactgactatctcccaatgtctgcttagttcaagcattctatcttctattcaaaaaaaaaagaaaaaagaaaagaattctgtgaactgggctaatcatcctgatttgccaaatacttttgggtcgaccgtgattagaacttaattctaactgctgtgtagtcatgaattattttagatggtacttaggacaaagaactctgcagctgtttttaatagtcagtcaaatccacctttctagataccctttaataaatcctccccgaaagactactaacatcacccagtggtgatgctgaggtcacctgctgtcatacttagggcactgatttcccataattcagaaagtacacaaagcattttgagagtagggtggctctaagcaaatataaaggtctgtctatactataatcaacacaaacatacatgcttagtccaagtgcttttgaacatgcacatctatttacagtgcataaatgctcacttggttcttaacacagcttccctaaccggctaacatttactagtgtaaggaaagcttttaaagcaccttttcaattttgagttaaaattgtggaaaattgatcttcaatggaattcccctagagatactgttttaggattaattttttgacacaagattcaaaacttcataagaagattcttaaatctgctggcaaggaaaaaaaaagcaagcattgagaagccttggaaaggcaattccattttatacacgcgatttcaaaagccatcatagatatgaagtgttctgcagtaaggaaacggaaccatggcaggatgatctacctttgcttatagaaagggatgctgggacctacaaggtaacttttgaaatggctttcgccaacaatgccacatggaattgtatttgcaggtgttacactgtggcaagccatgccttcaccatactgcaagccttgacattggctctattactgcttgggatgccacagactctgctctgttttcttgtgtctgtttattaaagagctagttaagagttaagacaccacagtggccacggaaccaagaaatgcctattgatgtcaaatggatgtaggtcagtaactcttgaaccactagcctggaacagggttatctaactagaggaagctttatttctgtgatggttaggatgcagagaaacttgttgaattgagaaaagttttattgtttctttactttgggatgtaatctttttttaacaatatgttctcagtactaaggagaacaaatttactgtttaaaaattgagcccaggctacgaggcctagaaagacctgtcctgtcaataaggagatactgttaactcctttgtaagcaatgggttctagaacagtttggatagctttgttcaggactacttatgaatcatttagaccacctaatttaataaatcatttaaaaaatcgagatactttttttaaggtttaagttaagtgtttgaaaatgcaaaagtggtctccagaggttacctctaaattgtttttttttttttctaaaggtcagaaatgtattgactaaacttccaaaactgcagtgagaagggaagggttgcttccatctaaattaacaatcaatccatgtgtcaacaaaattcagataataaacatcaatcctagtgatggccctgagcaatttttataattagatttcatcatctgtgatcctctaaccgtcctctgggcaggatggggaggcgcagttcttaaaggggagtcagtaaggattctaatggactttgtactccattgtctggggctgtcatgccagaattccatgtccctttaaaactgggatctgttctctccctttagctctgtaggatgtgtcttgcatgagtcaaacagaacaaaatatgccagtcagcccctcagataccaggcactctgtctcccaaagccagagacagtgtcactgtggctaaactctcctgtggatggaaccagggctgtgagagatgaattgactttctcaaaagcatgaactagaagttggaaaggggttgtgtttgacttccccatcttcgaacacagttgcctcaaaactggataactgtagacacttaagcacactcatctttccccattgttctgtagaggaggtcttttactttgaaagttaattttgaaatggaatgttttcataatagagtctttctcaattttgttaactgtttcaataaagaaaactctaatttcccaaaaattaggcatgcactgttgaaataaaacaaaggatgcatgatccaaaacagctttcaactagtcagcaacgagagcacatcctcttaggcagttaatttgtttttgctacttttttgcattttggatcagctcagcttaaacacagacacttacatgtgctctttagagtattctcaatttctccccttcccatcttccgtcaaaatgctattggatgtggtataatctttctgaatattaagaaaatcttaacaattctagtagtctgctcactcagtctttgccatatattatcattacttaaatgtattctatacctcattatttcatatttgtgttttgtcatattctcattaatatataactatataaattatcaaaactaccaaactataacctcatattttgttagcatatttcctgaaaactctaagcatcttttggtgctagtatccataaagtaaaaaatcaattttgctactctttgatgagttgacaatagagctcacatgaaaagcaaactagaagccatcctcactcactgcagagagtaataaaggcccagtaatgggcagagccaacaaacatacataggttattgttaccaccaattcccactaaaaagaatacaacccagaaatgctaaagctgctgtttcattaaaggcaaatggatcactaatagattgatcatttaagcttcagtgttactggtattttaattctattcatgcttaaaggtcatgtgtcccaaatagaaaaatcatagtaacggaaaggtcttaaccaacatggtctcttctgacatcatcattgatgagaaaccatcgcccttgttctattgaacaacagaaaggtataaagtgtgactcactggcaaaaagcaaaatgtgcatttcattaagtgcctccccttccagccagctgctttaataatgtatcatagttgctgtctcaaagcatggagtctggagaaccttgagatgatgcaacctaacagaggggcttaaacctgccttcagagagtccatggagacagcctggcattaattccaagcaaatcccctaggcatccccaatccacaccagtcacataaactaaacagagtgctcagcacttctctagatccgtaaggcaaattgcaaactaaagatccattaatcatttttgattgaagctaaagtatagcattttaagaaaaatatttccaaaaaaaatctcttgtaaaagaaaccaaatgggggtgtagttcacttgagaggggaaaggagagggttgggaaattcaggtatcagccctccagagccatggagagtattcacctcaatcttctctgtgcagttagggcaggcagcatgctctgggtaataatcctaatagtggcagtttttaaagatctgctcaactctcctcactcccaggacctgagatcctaatgaaaccacctgtgggatgcgagacctacgactgagacagtgtagccctcagagagcaccatttgctgaaatgtctagtgagagctaaaataagccactttggtgaagggaaaaaaaacccgctgagtggttggaatcagagctgcagaaggtcatttgctattttaggagctgcaagctggtccccgttttataacatcacagctacaaacacgaaattgtcaccttgcctgtcagtttgcttccctgctgaagcagaggtggcctgcttcccattgaacctggccatgggtggtttgtttctaaactttgctttattgttgaattggtatgcaaaaaaagttggtttccatacttttctgtaatttggcttcaaaatatcttccaggcatctctctatgccatctagtataactgacctttaaaactccatctagctgagtaaactcccccctaccccccatctcagccataccttgctgactgggcctttgaaaatggagttcttcttcactttgactcattaagtacattacaatgagaagtactcaagatggatgagaagtgtgaaagcttgagagcaagggagagagacagacacaagatagggacaaagagacagacagagacagtgagacaaaggcagacacagaaaggcagctttacaggactatttaggcccagaccatctggagatagaggaaggaggttaactccagccccaggcttccataattattgcatacactacagagaattaccatcaattttattccattttccccttcaaaaatttaatttctctcttcacattgcccacctcataagtagagttaagattacccttaagacttttggggaagtgtaacaatttagctatattgttttatatcttttcaccaaaaatgatagttttcatggattattatctcatgtgaattacccatcataattttttgtctcatttatgaatttacaagggaacatacatggaaggcagagagaaagatattttccatgaagttaataaatacaagatcagaaacatggacttaacagttgcctggaatcgcacaccccgtttccctgacctgcactagaccacagtccttccttgcaattgggggcaggagacaggactgctcatatttgtgtttctcactcttcgacaccatcttattagcaattaaagcaactgtcagactctgggtgagctgagcaagctctgctttaccgagcacgtgtacagggtcttcacagagtggttgcagctgtgttgtccttagaagtccctttgccagcatggatgaatcaccttcctccctctgcctgatctcagaaagtgtagggtccaagtgcaccacctctagacatggcaaactgtcatattcctgttgaactcattatccaagcacagttcatgccaactcctctttcaccatgcaccatcttcagcccaagctagttaaagaaatcaataaaagccaactgctgagaagtagctgcaatccaagtcagggtaggagatgaagggcgtgtgattgcccagtaagatcccatcttctctgttctttctcctcctggccccctttgtctggactttctcatgtggctggtccctggaggggactgcatctgctattaccttttctctttttccaggcagggactcctgaagctcctttggctcccagcaggaacttgcatactgcactcactgtctctcctttgtcctttctttttaagtccttttcacaactgcagactctcagcccaagaaaactatcttgttctgatgttcaagcatctttctaagggacagaatgagccctcccggccatactcttttaaaaccaggaatagctttgccctgtgctttcctgacctgggccccgaaagatccaagttagtttctgcacatggctgtcccacacactgcagtggctgccttccatgccaagtatgatgagccttatgttcaaaagacatttgacgtatttcctaccacaaggatgtaggaaattacagtacattcataatgttcacttctctccattctaaatgcttagaatttaaggttatcaaacaaaagatcaaccttagcctgctcagatcttttgtgaaacaagggaataaaagggtgttcggatggatatttgacaggagatgatggtttcgtagaagtacggatgtatggacatcgtcaaacctctgtataataagtcagcaacagttaagctcctgctcttgttgatgtccttgttttgttgccatgtcttctagtcctgtttattttctttcagaatcatcttgcatccaaacctactagcccttctctgtcatgacctagtccagagcaacttctatcttacccccattttcacaacaacctgattccactcacacactcactaacacctttccttctgtttgtcacagttaggatcactctctggaacaaaactctcatcatgtccctccttcacagcatcctgtggctccccactgttaaaaggtcaagtctaaaatcctaggattagtaagaagcctgggccttcttactcaacccttcagagtccagtccctatggtcatacagcttcatttctccctatctccttgacacactcagtatcgataaagctggactttttgacagaaaaaaaaaatgtagctgactctagaattgcttttacaaactctctgtaaactagtccagcagagtagctcattctttctcaaccttgtctctgcagtagcaaaataaaaataataataataataaaataaaaagggagttggtgataaagaattaaaggttgtacaagtgtaacgggtaacatctgaaatgacctaacttagtgcacatctctggctctgccttcttaatattgttccctctacctgcagtacattttattctcttccatgtgacaaacaactcctcatccctcagattgtatgttatcttctttctcccaaagatacaactgagcactttctccttgagtatctgccaataattaagggcatttgtttcatcatactataacactattattagatcgtaatgttagacccccgaaaactcaagtatccggggtctcaggccaggttcgcggtcaccccaatcaccaggcagattcgagagcttgctgcaaactgcacgaggctttattgtaatttaacgaactaaccccatgttagctcgggtctttcacccacccgccatggcagacggctagaaaaagacggctccttgggtctcccaaaagatcttatagggcagcgtaaggggagtgtctaggggtacgcacaggctcaggattggtgtgcctccaggcttggagggcttgccctgtgttgattggtcaactggttgttatggctcataggccctcccagggtggttgctatgctctctacgtcattgctgtgcgcttgtccgtaaagcacacccagggtcgtaaagcatagcgccaccagctaacttccgattggctccttgtcacgagacaggcatctgactttctagtgactaacttctgatgggttccttgtcacgagacaggcatctgacctctacgtgaccaaggtaggtttatggcaagcacgtgttcggctgttatggctgccaaaagggaagccggttccttcagtaaaagataaaatcaatgttttgttgttgttgttgttgttgttgttgttgtcgttgttgttgttgttttagtctataccttgacttgatatatagcagttgctttaaaaaacaaaattgttaagtgagcacataacattgttttccagttcttggaaagctcagagtattgaagggtctgagacagacagttccacagaaataaccacactatcagcctagatagaatcagaactcaacatgaggagggagagtcacagtatgtggaaggaagtcagcccttccataggaggccatgaagaggcagggaagccttcactacaagtgtacacgcaacccagtcctgaagttagtgtgcagactcaatgtccaatcttcttagctcttcctcatattgatggtccctgtgctcctcttcaatacaccataaaactacaaatgttaagtggcagaataccagaggattcttaaacttctctccatagtttgtagaagataacctggaagagtagctcctcagtcacaagcaattccaagtagtaattctagttttgcttataaaccctgaagcctgagagtcaccaacaaatcagcatacctttgaagataaaaacaagccactctaggtctgaaaattgtaaagctttagtgttaggttttcattacataactattggggaacagatatctaatttttagaatatatataattagactccccaaatgaaattgaaaaataatgaaccatgacttaccaatctattttaatataatgtagagagcaattcccacctttctttataacataggaggatattcaataaactttgaatataagatttttgtaagaaaaggattttgcaatataatatgctaaaaagctagaaatgttgatgttgaagccaatacaatatgactgtcatcgtaagttggcattttttcagtgtctttatctctgtcactttatagttctggtttgaaaaatgctaacatgtattgaaatgtctcccaactgactaaaatatcaaataactttcttttgtctacattcaactgttcagtctgctttcctggccagaaatcagacagaatgtcctcccagtgattgactcagagtttccaaagtgccaatcagctaaggagaacttcatttacaaagttcactagaagcatagcttatacttatatttctgtgctactgaaagtcaaccaacttcacaccatatacaccagaaatacagtgaggagcaaatagggcaccaacattactttcaggactatcctagaaaaacaaagtaaaaacatttagaacaaaaagcaagcttacatttccaaaagcacctgaaacacaagaaagtttctgcaagaacatcagtgaccaggcagacttgatcattccctgcatacccccctagcttccctcatttccatgtgttcaaacagcacatgggactatgaaggaccgccagacaattccatctgacacaggcgactcttagctagcttagagagctttcctgtccagttctatcactcaatcaaagccaaaataacagcaacataagacaatataaaatacaacttacttgagacaaacagctcaaaggagctgagcattggtggtgcatgcctttaatgccagcactcaggaggcagaggcagatggatctctgagttcaagaccagcctggtttacaagagctagttccaggacagcctccaaagcaacagagaaactctgtctcgaaaaacaaaaaaacaaaaaaaaaaacaaaaaaaaaacaaacaaaccaaacaaacaaacaaacaaacaacaaccaaaaaaagaaacccagcccaaaagatattctgtcacctactctttttttgtttgtttgtttgtttttgttttttgagacagggtttctctttgtagctttggagcccatgctggcactcactctggagaacagactggcctcgaactcatagagatccgcctgcctctgcctctcgagtgctggggttaaaggcgtgtgccactaacgccggactcacctcttcttttgttgatatgattatttccttgtttataaccttttgacataagtatcatcataggaaaatgttttaagattaaatttaatggctccatgaacaaatttcattagttacttacccataagccaatgttatttcatatctaccctactcttggtgttaactgtgagagatagacatagccataaatagagatgaaaatacatgtccctggatgaagttttgtttttctactttgttttcccttctatatttataaacacctttctctttcattgtatcatttagtcctatttttaaatatgagaatacatatgtgtatttaatctcctctttcaagtataaaaccatttcagtgtttttcaaaacatttttgtgtatttggaataggtgtgttaaattgtttagaaaatgtcaaccaaaaggtgaacaatggagtaatttattatgtgttttcaaggcaaacagttatttgaatgctttacaacttgtaagacaccaaagctatcgacaaggagatgagaaacttttgaccaaaagacaatagtttggatgctgtaaggtgagaagtggagtttagatgttttcatatgattgtatagttagcccatcactagccacacccttacacaaacatcttctagaaaccatttcttggagtggaaagattttactcacaaaacttcaaattgattttttttttctcatagatcgaattgcacagaacatcattaagtcccatctggagacatgtcagtacacaatggaagagctacatcagttggcatggcagacccacacctatgaggaaataaaagcgtatcaaagcaaggtactccaggaaccatggggattgtctctgtaattgctcatttctggtttcttttctcaatattattgacatttttggcctgagcattcttggctgttgggctaatcctgtgcattgtaggggcaattttctgcctctctggtttctattgactgagaatatctacaacataccaactttcacacagctgtggcaaccaaaaatgtctgcttcttgccaaaagttccttggaaggcataactgccctcattgtaagccatggccccacttgaacaaccagggagacggtgcctctgtcagatggtttgggacttctggtagctatgggttcagacaaggagcagaagacattagatggtcacaacaaaaatgatgcccaacattgcttaacaaacacaggaagcaaagcattctgcatttttattcttgcccaacattcttgaaaaaggtcctagaaaagggtagttcatcttgtactatcagtaataatcatgtttccctaagtacactagacacattgaagggatagagttgttccttggggctcaggattcgtattacttgactttggaactgagactggcaaccacaagttctaccagttgagggaaattgagtaaactgaatgtgcttatctaaacgtatgatttaaacaacatggtgatctaatttttgctacctttgcataattatggaaatggacattagaagatccataaaatgtagacttcaaagtcacatagatttagatttcttagttcaaagaaaatgacgaaagtattaaaatacatttgaagttctgtattactagagtaacttgacttgaactcatatctttcctttgaatttctcttatacaaaagaaaagaattctgactcaagtttggtggcttttgcctgcaattcccacactcgaggtggccaggacagaaggattttgcagatctgaggcccctgtgagctccaaattgagttctaggccagtcttggctacacagcaaacaccccccacccagaattttttttccttaaaatctaaggaaagaacacaacataaaaatattacgtttgtgtctaccaggttcccatttaaaaaacaaaaaacaaacaaacaaacaaacaacaacaaaagtattatgatagatgctaagataaaatcactacatcaggtttgtttttatctagcagactaagcaagtttgttgccataagaaatggggacaatagtaaagaaaatagttgttttgcatctgtaaacattgtttctcctagtttggctttggtaaactaggtactttgaccaagtcaaagtacctagtttaccaaattcacatttggtattcacataattccaaagagaaaggaaaacaaaatcacttgatttcccacattgggtggcagtaacaagtggggaggggcatgcacatttcatcagctccttggaggaggtgagttcaaggcctgtgtcctctgcttcagtccagggaggctctgtggcagcagtgtgccatccagatcacccacgccatccagtatgtggtggagttcgcaaagcggattacaggcttcatggagttgtgtcagaacgaccagattttacttctgaagtcaggtaagccagactgacctgtgggggcctgtttgtgggaggcactgtttgaccctcagcactctgatggtccaagaaaatccctgctcccacaggtcttaccacccacactgcccgctaactccctaaggaaactcagtaataaaaatgccccgatagatattcattcatttcctcctttgaagtcaaatacaattttgcttattgaaagtagagctattaattgtggaggctgagatgctcagcttgacaggcagtgaaagtaattagcgtgtcaaggtggctgaattgctgagctggcgctaaaaccagctccttgccttctgcaagagaacaaaaaaaaaaatccaggctggctgagctcagcctctgtggtcacttccagtcattttaatgagaatagcctgcagcagggatccactggaagaaattcctcgggtttgggattcttccttccgcttgtctaatgctctttttaacatacaagcaaccccttaggaactcaacataagattaatactgaagatgctattgtcttaccaagctcgaacacacacacacacacacacacacacacacacacacacacacaaaaaaaaaaaaaaaaaaaaaaaaaaaaaaaaaatctcatgtctttcttggaactctttgaaaagaaaactggaacacagtagcatttgggtttatcctcttagactcaatcaacaatgaaaataacttccttttctcgtatacatgccttcacattttacatgtctcatttattcttatgagatcaccatcatttcatacttgaagcaaagatggtaaagataaagaaaggtcaaaggcagtgtgttcaatatcacaaataatacaatatcacaaatatcacatgataaaggtggtatttgagtataggtcacatttagttgttatggtaacaataatgttgactccttagccaataatataaatgggcaaaaatattgactcaagcactaattccaaagttttcagttatctaaacatcctaaaacttaaaaaaaaaaaaaaaattatttatcttgccctcaaagctatagtctatagggaatggcttgcccctatatgcttaccttctggtgtgcactgaggcaattcccattaggacaggagaatccactttcttgctcacatggaagacaatctgtgctggatgacaggatgacatcagcaaaggcgctgggttggagcttcaggtgctgtctccacagatggcctggacttccaggcaacatagtcactgagctccagaagctagaatccccaaacagcacaacagatagacattcctaaagtcttctgatttaccttaagaagtcacatggagctgtatataccatcctctatcagttaaagtcatcatgaaagcctgcccagggtcagaggtaccaggtatggcttctacctcttgataggcttaggaagcacatggaatagatgatacttttgagactctcatcaaaaactaaaatctgacccatctgatgtatggccttgaactgataccttaagataccagtgtcctaacctttaaaattagaatagaactagtgttagacccccggaaactcaagtatccggggtcccaggccacgttctcggtcaccccaatcaccaggcggattccagagcttgctgcaaactgcacgaggctttattgtaatttaacgagctaaccccatgttagctcgggtctttcacccacccgccatggtggatggctcacaaaagacggctcctaggggctcccgagagatcttataggacagcgtaaggggagtgtctaggggtacatacaggctcaggattggtgtgcctccaggcttggagggcttgccctgtgttgattggtcaactggttgttatggcccataggccctcccagggtggttgctatactttgtgcgtcattgctgtgcgcttgtccgcacacctagggtcgtaaagcatagcgccaccagctaacttctgattggttccttgtcatgaggcagacatctgactttctagtgactaaggttccttgtcatgagacaggtatctgactttctagtgtctaggacaaggacatagaagcacatgttcggccgttatggctgccgaaaggggaactggtcccttcactagaaacacacaactcaaaactaaaaattgtatcacgtgcagcaaagagcttcccaacagttcggcgatgcagccaccatcacagactgcggaattcaaaactgttagaagggaacccagtttggcatatctctgagattcagatatcaccaattcatggataatatttgagggccactgaattacatggtctctcaccttcaaatggggagaagctcacagctccaaactatggcgaaactgcaacagtaatgcttctcaagatacatgtatgttgagaggacagacaaaggcagttgacgaattcgttcagtaaacattagtaagcacctactgtgtactggaaacattccgtgttcctatatgatgcaagactgaatgaaattcccccgaaagcctgttgctgtttcatgtggcagagaaacccaaaggtgaattttctcagtagtagcccttttaccaaagctcacaaattagatgtgaggctgacacaagtctttcctgaaccatttatcaattataagttcaaaagctggagtgaaatttaaaattagtcaacaaatcaaaagaaattcttcactccccacaaaaatgatattgctgccttccattttagctacctttaaagtatatttttgctttaattctttatctacgtatcaaaagatctctctaagattattactctgtgtttgtgtgcatatttgtgtgtgtgtgtgtgtgtgtgtgtgtgtgtgcgcgtgtgtgcatgtgctcacgggtagaggtacctttagaggccagaagaaaggatagaatttgctggagttggagttacgggtggttatgaccttcctgacatgggtgttgataacccaactttggttctctggagagcagcaagtgctcttaatagctaaaccatctctctagtcccttaaaattactactttcaaagaaggaacatcttttatttatttatttatttatttatttaatttatttatttattagttgtagttagggaacaagcttgtttcacatgtaagtcccttctccctctccctcccctcaccccatccctcctccccacccccagcctaccccccaccccatccacccaccactccccaggcagggtagggccctcaacgggggctctgcaaagtccaccaaatcttcctgtgaagaaggaacatcttgaaagctcctagatttgatagaatagcctagaacttgggggcagaggcagaaggatcataagtttaaaaccaacatgctacatagggagaagctttatcaaacaaagtaaagtcatgccaggcgttggtggcacacacctttaatctcagcactcaggaggcagaggcaggtgcatctctgtgagtttgaggccagcctgctctccagagtgagtgccaggataggctccaaaactacacagagaaaccctgtctcaaaaaaacaaaacaaaacaaaacaaaaaagtaaagttctgaaatgtttcccatctcgtttgcactaggatccctttattgttggctaagtgatatatgtatattcatttttaattcctttaactctgtgcacactggggaccactttattgttggatatatgatacacatttggaattcttttatctcataggttgcttggaagtggtgttagtgagaatgtgccgtgccttcaacccattaaacaacactgttctgtttgaaggaaaatatggaggaatgcaaatgttcaaagccttaggtaagtttccctttgatgacaacagagctttactaagtattgtcagcttccccacttagactgaaatagcaaatgatatgccttggaagaagctcactagtatctcactatttgattggcattggaccaggtgagtgttcagtatttcatctaactctccagttcctgtaattttagtccctaagcaggaagggaaggaaaagagccatgaagcctgttgaaactggcacaattgagaccttgtggaaatcaacaaagtctgatgctaaatgagttgggtctactataggtcactctttggacaactaccattttttccagcttctaatttactgctctacagagcatattatgtagaccactgggagtctatggaagtaatctgaaagtttcttaaataaactcataatcattggccaagataattaaaaagaaataaccatgtataataaccacaacaacctgacgctggacttgttttccttccagaagagtgtgtatctgcctgtgaactctgagtttctgggagcacaggcagttggcaatggcctggccagagtgacccctagaccattctatgtgccacattcagtcattaggatgaggcatgcataagaacattagcaaagatgggccgatgccaggaaaggtctgaacaagtgatagggccacttgttccgtatccacccatggacaccaaagaagccattgccctttcacctcttgtgctgttagctgatatggcagccaccagcaagcccaatgggctggcaccattccccttctacagttgctatgcatccatgtccttctccaggctagattttcaagaaaggaggaaaagccctggcaagcagcttcgggatatttccagcttcatcaaataaacatttacagagatcagcacaaggatagcaatgctagtttgccaaagttcacaatgactaaggaactgacctgtgagccatctaattagacaacgaaaatcagtctaagggggtggggcattgcctaaaatgaaagaagctcgttggcactgtaagaagtctcagtttgaagcccctggatacctcatgctccactgcaaatgacactttctaagccccggtgtagaactttctaggttttctctgaaagctgtggatttagtctaaaggattctcagatcccttattttaaaaatcttttcatttttttcttttatttttgagcttgcagtataattatgtcatttttttccctttcttccacccaaatcctcccatatgcccctccttgctctctttcaaatgcattaccttttttgttaatagcttttacaagtgcatgggcgcgtgcatgtgcgtgcgcacccatgcacgtgcgcacacacacacacacacacacacacacacacacacatatatatatatatatatatatatataatatatatatataacctgttgtgtctgtttacagggctgacctttggcttttgattattcctggggaaaactcttcctcccactctcggcattccctcattgtctctagttctttgtgtagggttgaggcgtcatgggcttcccctcatccactgtggcatatcttttgttgttctcattcagctcatgtccaggcagtcacattggtgaaactttatggatgtgaaacaaagtctcaccatgtccccagctgacctcaagcttgcaattctcctgcttcacccttcagagtgcagacatcctacacacgtgccatgtgccatcaaattcagcttactaacttttaagctagaaatactttcagatttgtagggtccagggttcccagctggtgtgacatggagtacccactagccagtattttacacacaccccccccccgtcgataacactaccttcagttacccggcaaaggtgttacccagtttcctcattctacacttaatatcaaatcacttcgtgtgactgagagctgaaaatgtcccatctagctgtctgatatgcaaacccttgagtacctacttaataatgaggtatttcttcctgtgtcccctcccaagttcaagtatttccatttaagatgtctccttccttttaggttctgatgacctggtgaacgaagcatttgactttgcgaagaatctgtgttccttgcagctgactgaggaagaaatcgctttgttctcctctgctgttctgatatccccaggtaggaaggcacgggtcccttgccttcttttcaaacctgcttcactatctttaacatcaattacacctacccaagccaaagcagtcaagaaataactttaaagagactgtattttctctagcaattgtttgatatttttggacaatgcaaaggcaagtggcctcacatttattgaaatggccaattttcccccataaaacaagaattcccatgtgacagggatcaccccagatccaggtaagcaaaactattcctcaacaaataaaaaaaaaaaaagtgaatagtggcttgactgagcagctgggttctattttaagtttaagaataaaggactgtagaatccaatagagtgaaacttagagaaaatgtgtaaatgaaagaccaagtgtaggaactttaattaccatttttagacttttctacccactgcgtattgcaatcgtctttcaagacaaatatccttggcaatattaagcatttccaaggggaatgatagctatggagctggtcttgcctggtggagaagaagaatctcagacatggctgcatgccaccatttatctgtatgactccaaagctgtagttccctcattgataaaataatgcaatagactctataatggggagagagaagggggacaacaacacaccttctctagctgtaaaattcagtaaaatactaaattgttttccaaagctaagatgtggcatttatggatcaagtaaaactgtagcaacggatgtactttaaagtatatggcctgccttaagtgtaacaataaagagcttggtaatgtatagtcatacaatataataaaaataatatgacaagaaatgtgctccctcttcgaccagagtccttcaaacaactgtctgttagatatgtggtgtaacagcttgttgacagctcactactggttgaagaatgcatcccttcccaatgttaagatttatgctttctgcaatccatttctctctaagattaacctctttacttacatactgacatttttcaataagactggaagaaatagtttttaattctatcatatctttaacatgtcatcctagctatagtcacaaatagatgcctccacactttcctatccagaggctatcttactcacaatatgttcagttatagacctatcaaatctttttttaaaaaattgcttcttgtttttatttgacccttttcatcaaaacctgaaaggcccaagagcacaaacacacatagggaaagtgacaaaagtcccttctataacagcaactacatggcagatcatgtcctcttatgttctcactacatctgtcctgagctctgctccatggaagaagacagcccccatccctgttttctgctcacccaaaggaagagccttataaaaactcccttcctctttgggcatgtttgtggaactcagagaactcctaggggcaaatgctgaagacacaccatcttcagcttgacagagcagtggaaatgctcatcccagaaggctaggttgatctccatgatttagaaatctaccgaactccttagcctttttgaagactccagatgctgtccttatgctctgaagagtttagaaagcattctatttgccttactcttgctgtccagtggggagtcttccagcctgggtagcagacccacaccccaaggctttgcaatatcaaatacactgtttgtcatcctggcatagtgccaggcttagaggagatggaagacagatctgtgtcctctcgggtcacttccccagccttttgacttaataactactgtctatttactcccaaatagcttaaggaagggcatgaggaactcaatttattctgattgacaattgtcactgaggtcctttgtgctcacttacgtaagggcttgcttaactcttggcttgacttgtccttgccttgtctaggattacagaatcaagtttctcacccgacctgaaccatgttcaggaggatcttggccaagagcttttccatgtgtatttgttccgcatttggagtctcccagagtctcttgagcaaactgaggcaatgatactaggctgactacactttgtcaccatgatgtataaagcttataagcagaaaggaaggaagaatgtaaagagagaaagctaggaagaggatatggacaagaacaagggaaggagaaaggggggattaacctacctatcagttaattcgggacaggaaaatcagactcagaagttcatttctgaaattgatgtatgtgaattacagtaggtgtcagctttatacttgataaaggaacaactcaagctaaggaagcgagttgtaggtgctaacagtattcctatatgatttcaaatcagttctttctgctttgaaagaaaatgtaagcatccgtctggagaagaaaaatgctgaaacagttaccagcacaaggcaaagggggggggggtgaatcaaatggcttccctgtatagctggcttcaccacattattggttataggctatttttgttccatataaataattacatatcttcaaaagcaacttacaactgggtgagataggtccaaaattcaagagttcatacatgcagggaaaagaagcaaagcctgtgtgcccttttcttactctttggcttttttccccttgtcagaccgagcctggctgatagaaccaagaaaagtccagaagcttcaggaaaaaatttattttgcacttcaacatgtgattcagaagaatcacctggatgacgagaccctggcaaaggtaagtcctcaggtcacaggcctgctgtatccaaaggaaccccacatgagcaaggagaagttctgagcagagcaggctgcataaatacaaacacatgctctttgaaagggagatcagcacattttgagacgttgagaaaaaagtggcttgtttgaggagttgttttggccttttcttagttggttgttaagagagggcctggctatgtctcccttgaactcatcaccctccccctactcaacgcctcagcttcccaaatgctaaggttatggttgtatagcaccatgcctggctggggaattgctttcctggagcaggaccatattgacagatctgagcccaaggcccagggagacaaaacaaaagacccacaggtatgtcaatgtcttcagagtaacagacactggaatctgggaaacaagccttcaaactcatcagtgaggaaagagcaggctgcacctcctacagcagttgggtctgggccaaattaagatcactgcgatttatttatattcaaaattaggaagaagcatggaaagttgtgtgtgactttctgaacacaggagttggctgccatgtgaagtagcagcatgccactgtcagcttctgccatatactgtctggtgacctctctaatgtgtcaggacagtcctactttgggtagtttatcctgacgacctcttaatttcccttccactctgatctcttcatatatgtctgaaataactggggttatttcaacatgctgacatagtagggatgaatgcatggaacatgctacccatgtcattttgtgtgccaacttttcctgtggagatgcaacacaggtgtctacttacgtcagatagaaaacccacaacagaccacagatactaccaaagtccaacttggtaaacccatgagttttacagggttatgtacaggaatgttagttgggggttaattacaggaagagaatggattcaaaaacaggtgcattatcaagacctaccctagcagctcacaaaaagctggtaagttggagcacactgcacagcctgcaggcaactcaacaggttggaaagtgtccgttccaagtgactctggtctaaacctctgccaggcaacttagctggtttctgcttctcccaggcaggtgttctggtctctgggtcttctttgcaacctgcttcttctgaaagtctttgcagcttagctctgccagtctcagagggagtctcagttttgtttgcttactccagcagagagaggccttgggaatctgctcagtttcagaaacttcctggaactcttgagttgtataccttcctgcttaaggagctttccttccaggtagaatgtttcaatctccaaggaaactgttacacaacagagaagtattaagaaaagttgttcaccaaagtaaagtgatcatagaaggaagaagtaattgtcattgattgacattcagcattattttaaaccttaaagcgatttctcaagtactagaattttttagatgaacaacattattttaaattttaacatatctttggtttcttaagaattaaaatcctcaaaaggcaagaaactgagaaattcaacttattcttggttaaagataataggaattctactttttatatttttatcattaagccttccgactcttggagttcttttatttttaaaaagggggaggaaaaagactatttggagacaacatcagattttactttgtacatactgagaactgctataaaaaacaaaaaaaactccataagtaaaaaatgtttcttcattatgatagagtttgttaaaattaacacattaccaggaagaacttttccacagcactttccaatgatagttcccttcgacacaacttttcctaagggcaagttatttgctctatgtacctcatttattatccaatcaagagtaaaggttgaacctactgttagcctctttgggcaaaaaaaaaaaaggcagcaactgaatatcttcatataagtctgtaattgcttactggcatgtaggaataaatatatccagtgaattaatgtagagtgtttccttttgtcttggtgcattattcatggtacatagtactaggtctcccaaggacattttcatacaaatatataatatactttgaccatatctcctctacctgttatactctctcttctctccagaagcgttcttgcttgtattttggatctcctaaaagtttcggtctctacatttagttcctaaagttagggacttaaagagaaacagagtcaaactaaaggtcttgccagtcttcttaggaaagttgtctgcctaaaaaccctgctctcaacatccacccaagaaggattagaatttgatgtttctgtacagattgtaatgatttctcaattgctcctgcaggaaggtgaaatatttgtacttatatgcttactctagtttctccatactggcctcttggtcatgatttgaacttttaaaattggcaaatgtaatatacttggtggcaagaaaacaattacaacattgatttaaagatcagcttaaacctgctttcttcagcattagtgaaagaaaaacacttaattctattctttttaattaagagatatttttagaagattggatcctgggaaaactctaggagaaggttatttcttgtgcaacattacctagagccagatgatggagcattaacttccagagctcatgtgtaaatgctgggttcttgattggaccattctttataatagccatcgcatgaatgagatgctacttactgatgtggaaagacaaaaatacaatgaagaagagattctcacttgtccccaatggattcagatacacaacttcatttgtctgagtttcagatccattgtcaagtaccaggaagcaggagtggatccatatagcttcttattgccttaacattttgaggacatgggttctatcagtgtttaggatggtgtgcaaatcagcttgctgtctgtatgacaaaaggcctgatagtaacaacttataagaagggatggtttgttttgactcatggcttcagaggtgtcagtacatggtcatttcactgtaattttctggcctctggagagacagtataccattgtaggagcacatagtggaacaaggttgctcacctaatggtagccagatgcaaagaacaagtcaagaatagagaaaactcccaatattccccagaatgccatgtccccagttacctaactttctttctctatgccacatttgttaaaggtctcaccacctcccaacaatgccataagcttgtgaacagacatttaatatatgcatccctggagagcatttaagatccaaggaaaaccaacacctccaacagaactgtcccaaaggaacaattttcattaagcccaagagaaagaccactccaccccactgtagactcttcccatctttacagaaacttgtcttattccttcatggtcacttcttaaaaaacaatggtcattttagggcaaaggcttaggttaaatcttcataggatgggatggggcaccagtcagtcatggttataatttgaaaaaagaaaatgtttataccacttgcctgcttgacagtgaatagctgtagatgatagcaacataaaggcacattatccatgccattggtgaacttcatcctgaaagaacggactccaacatacttccaacacaccttgaaattaaagtttaggcagcaatgctttatactttgagccaaacttcaatttagtgaggatttgaaaatttagaagttcagtatccattaactaggaagcttcagtgtctttatattaatcagctttatccatgtgaaaggatatttgaggcaaaaaaaatgttagagaatagattttcctctccttataagcatgttaatatgtgtcacattttttaaataaattattatagctgtgttagctaaaaaccccaaacacagggctcaaattccctgtataacaggctgaaagtgtcaccagtgtcttggaagtatttcaatgactaacttacataatttataagtatttcatctagttcataaaggtatttaccttcatgtaagctattgtgtttgggataggatcgagggtgacaggaggaattttaattcagtagggaaatgtctatataaaaaatatgtttggaatcatcactaaaggatggaaacttttcacaagataaaagtggatgatggggaaagggaagatcagtgttccatgtgatgggacagtatggaggtaggaaagtagaaggtttattcatgctataaataatagttagattgggtaggatcctgaatttgagaaggcaggaaatgagataacactggtcactttcatgaaagctcatgaaaaaataaatagacgtatatatttttaagccccatatgactagaggaggcagcccatctgtttctgggcttctcttttcttgtctgggaaacgagtaggctggattgcctggtctttaagttcccttcagtatagcatcctttgatgtccaaaagaaaaaaacaaaggttcttccagacattctctttgccctctgctgctcagtcttacgtggttattttaaggactccttggatgttttccattgtaatggggaacagaagaggatagctttgccccatcttgctgattgaaactggtactgtgtgtcataaccatgttgtttgcaatgatcttctaaaccaaagcgtgcagtgttgatggtgcatgtgtcagcctctccatcagctctccagggcagtttcagctcctgatgtgacaagcattggcctgacccattggaggaggttcgcttcctaggtgaggatctatgaggttcagggtccagttgaggacagcaggactgctgagtaaatggaaggatatcagtagtaaattctgaactgtgaagaatgctgtcacttcagatctctcacctgccatcctccttcattataaatcactaaatcttcccttcttgttactctgaccataggggcagaggcaaagaagaaggagggaccagtccaaggtagagagcatgctgtgaaagtatatacatagtcaaggacaaagcccagaactgggtgtctcactcagtcttgccttcaagtccatttcccactcttcccctctgggtccggccaacagttggaggcacatctgacacagggcttcccaattcagtccttcctttctgcttcctgggtcattaaaatcatcagatagccttagttatatatttatttcctcctagcaattctgcaaatggaaatgtctgcagttgtgttcttatcctaagttgtaatgagaagtacaagaccatcaaattctctattatgtttttactggacgttgttgatgtagactctgaagttcagacataaaagaaatccatatcttctacccacctgacacacagcctgtcatttgcttttctgtgtctgaaaataatctctcacctgggtgagagatctgagcattactttccccttccaggtgagatactacagtatgaagccctaagtttgcaggaagccatgcctccttcatattcacacaaatcacagccaccactttacactgcacaagaaattctcacgtggaaaaagtgttcctaagtcatggtgattttattcacaaatgcttattacagatcaaatctgcaatgtatgtatatatgagatataatatcacatgacatggagcataaaacgaagcactgctatgattacaataaaaagcaatcaatgatcaaaatcacatgtgtggtcaagggaatgaacaattcagagtggctgagattttgctgtgtacaacactgtactgataggtccagataagttgactttgagttttcaaagttatactcttattatcttacttttggaaagagaaaattgaaaactcgagtgatcatatacctcacccagaatggatcagtatgtgagcaaaagagtcagagttcaaacctaagccactaccagcagctaaataattagtttgtgggttcccactcctaaacatttgataaactcagaaatagacaccccctccaaagatccaagtctcaaccctactttacatgttagtgttgaaaatcttacttgtctcatttctggccactctcagatgatctatgctttcataaggaccaggtatcagcaacaccactgtgaaatgaacatagaagaaacaaccattcacccaatagagtctacgcaataaataccgcaggaaccacggaaactagaaagccgttcatgctgtttttccttgcattctccatgggatcagaaacatcagaccactctggttaataatggaatgttgaggcgtgtggtgtgtgtgtgtgtttgtgtattctttccaagcatgtaattttagtgtgatctgagacttcctagttgggtaactagtgaataggggtcaagttcacctgaaataagtactatcacaaaacaaaacagccctgcccagatcttgtggcttatgtcctcagtctcaccactctcttttctatttggtgagggatttgttatgcagttttaaatgtctgttttttttttcaaatttcttatattgctcagtgaatatcacaatgtaacttacctgtgtaaccacatctggggcatccccaaagctcccctcaggcttctacacagctgtaaatacatagtagaataatgcaagaacaggcagaattacataaaataccttaacagagtccccacgttttacatttcaaatctatattcacagaacacagctctctcctgggagagtttgccacttcaacctgcatttgttatgaatacaggagccaggagagcatggggaacagtgcatggcagcttcttccgggaactcagggaagagcccagactgtgtccgcgtattgtagctgcttacaatgaaccagcacacactgtaaggccagaaccacaaaattccaaacactgtccatcagatcaagcatctgtaaatcacaagagttcagtaggttactcttcactctttaagttgctggttggtgtactcattgtggttctgtagttacaagtaatacgaggcaagtttagctgagctaaaaaatgaaatgagatgaagcagtggaaaggtataatggaacctaacgttaaggggaaaaaagcagttcccactcatggaaaggctgggattgggaagccttaagattttccactttacatttatccatcttgaggtatctaatttgtttctctctctctctctctctctctctctctctctctctctctctctctctctctctctctgtgtgtgtgtgttgtgtgtgtgtgtgtgtgttgtgtgtgtgtggctggctggctggctggctgtctctctgtgtgcctttggctgtctctctttatcgctgtctgtctctctctgtgcgtgcctctgaatgtctctctatttctctctgtgtgtctgtctctccccccctttctctctctccctccccctctgtctctttctctctgtctgaataccaatgctttgcttcctggtcctcacgggatagtaacaccgagctccttaagttccttgctgtcttggctgcatttagaaagtaccttgaggctgtcagtctgattccaaatcctagccccagtcgagacaaaggcctgcttctaatgccaccccctatggccatgtggaaggaagacgtgccacaacatggatgtcatgaatagtcagaggagaggaagggaagagtttatggcatggaaaggaatctgaagctcaatactattttaatctaaatgcctaggtctggttacacaaattcaaaaaagaaatttgaacctggacaggtgaaatggatgcgtccagcttctccttcttctactttgatccaaccattgctggcttcctacgtcaggatgaacaacttcctgatggcgagttttaccctctgcttgtcccattttcccaacatcaaatgtaccacttctaaaaatgtgaattctctcataaaacctctctctggagagaagcgtaggattgttatctctcctcagctagcggctttctcttcttgtagaccactgtagacataagccacagcttccttcttataagaaacacttgtcattaaaaaaaaagagagaatgtgagatgcccttttatagatcttctgtctagttctgcaatgaggattatttggatgtgaaggaatttcatgatgattccgaattgactaccccctccatctccaagtgcttctggatcacctccccagctgtttaaaaagttgttgaatcattaactgctgctgaggctgctctgagctccctttgaaatgggggtccccagctgcagtacataatattaatgagcaataagtgactgcctgctgcttcctcctctgggcccttctgggcgctgccaagtgcttgtcactgtctctatacaacctcctggcctatcgtgcctgcagagaggtgatgccacaccagcacggccattcccacagctgatgggatgtctcaggcagccccttctgagacgatagagtttgccacagctctctcgctttctcagtgtcatttgctgacagagtttgttagctattcagcccattctacagacaaacaatagcaaatggatttaaatcccatacaagagacagaagtgaatatgagccaggctctgaggagaagtgaatttttatcagaaagagacaaaagtaaacattcgctttccaaaaacagacatacagttccctacctctagtcaaatgagaagccatcaagggtccagtctcactcttgtgttttcaatttcccatatgatccacccataagagaagtagcaaaggcaggaagaaccatgctactaggatctagtctataatcagtcaatgaataaatttattgccacaaaaaaatgaaaaatagtcgtgattttgcacactcattccaataaaagcaaatgactaattttcctatgaaataacacataatgtgctcagactcagacttgggtgcttagcctaagattaaattgggtctctgctgctgttagcatcctatgactgacgagcatggcctccccctttcactccttgaaggaaatggtaagtggagctggaaacatcacagcttaactttcactgtctgcttgattggattaagaatcaccacactacatctgggagggcatttccagagaggactaactgagggagaaatagccatcctgaatctgctgggaatgtcttagttacttttctattgctattaacagacaccgggaccaaggcaaacttataaagtatttgactggggcttgcctacagtttcagagagtgagtccatgaccatcatggcaggaagtgagtctggcagctgacaggcaggcatggctctggagcagcagctgagagtttacatctatatctaaaattggaggcaaaaagctggggcccagcatgggcttttgaaaccacaaagctgacccccagtgacacacctcttccaacaagaccacaccccctaatccttccccaaagagttctaccaaccagagaataagcattcaaatatctgaccctttaggggccgttcatttgaaccatcacaggggaacctgcaaagaagaaagagcccaggggctgatggtccagtcaaaataaaggaaagccagctgcactgtaatacgcccctccatacacaaaatctgctaggtgcctgccttgataaaatcccctctatcccaccacttcctcagtgccaggataaactgatgcttctgaaactgggacccaaaatgaaaaccctgcacatgaccgtgacgttgtcctctcatattttggttgcaatgactagaaagtaactaatacaatagccatcgtgtgtgtcgtcagcagacagcaggcagcactataaaaccatgagtattgactcattaaatcctcccagcctccctctgaaacaggaaatgttatagccaccatctgtgctggctagtttttatgtcagcttgacacagactagagtcattttggaagaaggaacctcaattgagaaaatgtcccctccagattggcctatgaccaagcctgtggaacattttcttgattgatgattgacgtgggtgggccaatctgacaaggagtgggtggtcttggatggtgtcataaagcaggctgagtaagccatgaggagcaaaccagtaagcagcacttctccatggctcagaagtctgcttctgtctccaggtttttgacttgagttcctgacctggcttccctcagtgatggaatagtaagctgtaaatggaataaaccctttctttcccaagattcctctggttgtggtgttttatcacagcaatagaaaccctaacacaacatctggctcataaggaagctgagttaagtggcttggccaagactgagtattttggcagtactaggatctcagcacagacagcctgatcccaaagccctatatccattattctctctatgtaatgcctgtatgtcaccaagaactcccaacttgtccctcatcatataatagaaggaacatatacagctctctctctgtagacatgaaaatgtctttgtcacctgaaagaacctactcgacactcagggaataggaccaattcagagagaatacagaatttacttgtcaaatttgaaagtttttccccccacaaatctgagcctccaaggcaccgtttctcagagcctattccaccggctcatgacatgagtgttcacaggggatgtttacttcaagcatggaatctgacacactggaactgaatccctgggagagggtcctggttatctgcactttgaagaagccctccagtgattcttatcacgctaaagattggcagtcatttcacagttgcatctggaagtttcggcagcatttcggatcatcaatccaacagccgatgattatgggaggttttcagagctcctccgcattcaatagctatttcagggagcactgtaatgtgcaagaagtgtttctaaattgttgctgtttccttctgtgtgaggcagctggttaagaaaacctcaataatttcccaagggctccagttaagtggacactttttaaactgtttacatataaagatatacaaaagacacttttctacaccagactcaaagtgagtctttcagaatggtgttctggtcacctgggacatagaccgtaagagctgccatattctggctgtgcacacctctctatcgtcatcaaccccaaacctaagctcaattactgccttagtcagcctaagctgccttcggaacattacatacacagcatctttgcccccgatcctaggtatgtgaggtttctttacccaagtggctgcacagttctctttctttcttccctgctcagagttgctgtcacaatcttagggaaggcttgttacaagaagttaggatatcttgggatctaccacttcttggctaccacccatcactctgaccacagcttttctctctgagttaatcagtgtggtaacttaatctctaattgccttagcaagtactctatgggcaaaatccggaacaattttgtgccttccggtgtcttgatattaaataagcatgcagttaattgttgtaaagtgtcttgactgaaagaaatgtcgttcatactgttgaagataaagtcttgattctcagtctgaagtctgacatggacaacaaagctaccttttttctttcctagcctttcttcagacagcagcagagatggctaggatgcagagccagaagcctcaaacatctttgaatgtttgaagcctcacatcataaagatgtgtctagatccctttagtgtgtcagcagctctactcctaaagctggttttacatttctcatagcacccttacagaataattagtggttacaaggaaagttagtggaaggggggaaattctgattttgaagaaccacagggtaattatctgtttgccgttcaaattcaaaggctgaaatgcattcttcttggtgagagggggagctgaccaggacatcacctgggtttgcttaattgtgttttgtcatcatcactttgcagtccatcttcaaacagctgtgtaaaccaccacacttgcctttagtaagagcattccctgtaggagagtctatcgcaataccgacagttataatgccgcatgaacacatgcttaagctaatcggatactaaaggatggttgcaagcatgtgtgacatcagaaatgttcatctcctaagatctttatagcatgcagcacaatggggatcatttaaattattacaaacattgttttcctgctttaactcaaagaaatacaatttagtatgtagttacggttgtatgtaatgtaatgatttgatatacacatattcatgttggctgtagacacagctccatggaagagcagccacctggcatgtccaagggtctggttccatctttagcaaagaaaaagaaggaagaggagcgggaggaagggagagggtacttaatcaaagcctggtgattatatgcaagtcttttacttgtttgtgaaatgcttccccaaggacattcgaagccagtacctctcaggctttcttaaggaaacacttcattttctgcattgtagtgaaaaaaagattagggaggagcaggtgaatttggtgagctggacttccgagtcctatggagggagcatcgtggatcacacctccaacagatttttttaatcagtgtacaaaataataaacttcattatgccaccttcacgcctagcatagcatgtatcccattcatatccgtgcccactgccttctctatcaaccacccccccccagctcctctcctgctggtccccatcccttcctccccagtctcctccgcctttgtcataacctcatactgctttcttttactttcctaatactatcatcctgcaaagcttagcaatgtaatatgcatgtcccaggagtctgcaggaaatgacggataatcattagttaacaactacatttcctacctgcagatttcagaacactttcatatcgatttccttacgctagccacgtaactcaaagagaaagataggcttaacaagcccattttacaagtgaacagactgagacagaaagtgcctcagagtcccactgtcctccacggttaggaagcaggattcctattcagatggctggcctgctcagcacccagtcacatatactaaacaagaaggcctcctgtgcatattttatttcggaacaatgaaccaggaggcttagccctccttccttctttgcttgcttgcttgctcttggtttttgtttttttttttttttttttttctttagaccatgggatgaggaatgtttttgttttcttttcaagggaagctgaaagtgagccttctctctttctgaacatctttttccaaagccatttacctttacccaggtcccccaaagacactaattcacaaaagagtccactaacgagcttccctctttgtctccctctgtctctgtgttctgcagttaatagccaagataccaactatcacggcagtctgcaacttgcatggggagaagctgcaggtatttaagcaatctcatccagacatagtgaatacactgtttcctccattgtacaaggagctctttaatcctgactgtgctgcggtctgcaaatgaaggggatgagaactctcagtcacggaatgcatcgccgctaagacaaaagcaatgtgttcatggagacttaaggaaaatgtcactactgcaacattaggaatgtcctgcacttaatagaattatttttcaccgctacagtttgaagaatgtaaatatgcacctgagtggggctcttttgtttgtttgtttgtttgtttttgaaatgatcataaatatacaaatataggacactgggtgttatcttttttaattttattcgggtatgttttggagacaaccgtttatagaattttattgtagatatatacaagaacagagccgtactttacatggttacttttcctgttgattgttcaaatataatttaaggaaattccacttactaggcttacctatttctatgtttttagatagttgatgcatgtggaaattcgtaactgtcttggaaagtactgtgcatgtatgtaatgaatatataatatggaagagtattatatatgactattacgtattcatgcactgtggcttcaaataccatgcccactagcaatggaggttcagtcaggttttctcatgtgatttactactttctgttatacattacttttatgttagataatcagggttttcttttccagccagagttttctgcccatacataacaacaggatagtccccattcagaagcaagtctacaaaggtatcggtgtgacatagagcagctttctcaaagctccacctctaccaatgacttgaaagccctgacaagacagcacatggtggggggatgggatttgaagccattttcctgttccataaatcaggctgtaaaccagacaataatattttttttactacaatgcaaaatattaggttttcccccatttggatttagatttcaaattgtgaaagaaacttaactttgatgcttattatttctttagcaaaagagaaaaactcagtctaagaaccatgaccaccatcaatgtttttagaaacatttgactagaagtgtaaaacaaggccccagtgctattttgtgtagtcattttctaaccatttccccccaaagaacagaaagaaatagaacatacaaagtaaagaagtaattcattcaattcatactcattataatttgttagaaagcacatcaataaaaaagagtaagcagtctagagcctaggacctccaattttttcaacttcaaaatgctgtattataaaatagagcaaaaattcaaaatattagacaaaaatgctgtattataaaatagagcaaaaattcaaaagattagaaaagaaaaaataatatatatatatatatatatatatatatatatatatatatcccaaggccgaaattctttcctacacagatgtaaatggcatcctctgtccggacatactggttattttttagccacttaaaagaacagaatgcaaggatgctctatgcagggtcttcacccatgctcctatgaaattaaccatcagaaaagcatgagccatttgttcttctagtccctggaaggcctgggcctttaatccgatctagtccaaagtaacactttcgaagaaacagccaggggacacactcatgtataagacatgatgtactgtaagtgtggcatggcccctagcttataaaaacctgccctttctccttgtgctcacacacacacacacacacacacacacacacacacacacacacacaccatgtgtttcactaatagaagctttgtttttggttttgttttttggttttgttttgtctttaatttcttatgttctcctgaagttcctggctgagagtcatctccaagacgcctcagaactctgtaggataatccaaacagtaatgctgttcatctttcctttccaaaaacaggggcttttgctcacctcatgattgatgaattccaagccattggggggaaacaaaaggctttaaaataatgaatctctttttcaaccactgttatattcaattaatttaactacattgaaccaaattacctttggttctgagaagacagctgtagactgcttattatgctgctacagggacctagttctttctggtgtaaatgtcactcctgctagctctttgtataaagaattaattccaagagtcatatttccttctaatggaaagatacttttctgattgctaggaaaacagggtaatggaaggcactcaactaaaccaagctgcttccaaatgcgatgtatgttttatgattggcttgtgataggcaatgcttactgtgtcttcttggcgttcccctttgagctttgaactcatgtcaatctttgttttcattgttctggttcccattgtcagcctgtaaagcccgctgggctgcaaagggaatcatttgttgcctccagtttaccttagaggatttacattggctcaattgatgaagtagctgagaattttttttctcctttgccccacgggtggtgtaggaaaagattattccccacatttgcctcagggggtactggttttgaaattgtgtcatttccactagtgctagcatttcactgggacagcgtgaaccttttgaagcaaagggacaggaaacagagctaggaactgaaccagaaccaaacagtggtaaccagtacaggcacagcccgctttccatccagaggagagagctccagttttggctgcagttgccaacttttcccttaaaagaggatcaagtcatgtttttaatggtaagaaagcctttaaacactgtcctttgaacggctcagtgactacatgaaatctcagtaagaaaaactctcttttaccacacacagtctcagcatgctgttccttctgagaactggccaatgttcaaagtgtgctagcatgaggctcgctctggaagaaggggctggggtctgtagtctccttcatgcctcaaggatgacaatcacgacttgatgtagatgttgcactgaatctgctcagggatgcttcatttaaaaaaaaaaaaaatcatcgagaagtgggagggataaacaggaagatgacaatgcaagctaagcggcataaatgaaacatgccagtgagagaccctctctaacaggcttcagaccagcccccgtgacagcgtgacagaaaatgaatgaattacatttcttctttggacctgcctaaaagttctgcacaagtaaaaaaaaaaaaagattagtttcattctctaaaatgagcaaagaacaaaccatccaggctgtcctgtttatctcccaatgaatccaggcttcctgtgtaagcccttagcaaaagaaatgcaggatctaactgtcacaggacagagttgacaggttgtgtgaatgacaactctagggcatctatactctgtaggggaaaaaaaggcagattttagagggaaaatgagagatttcaaatctgggttgacagttacgaatggccatgctgtctgtgacttggcctatctttgtgtcagtttttctggggatcttttattcccagattagacactgaaggtcaggatatactttccaaacacactttctgcattttctttatctgaatactttcttcagggttctgggctagaggacttctaagtaaaaagcggagaatactgtggtcttaggtgattagattcctctagcagcagctgagagactctaggctatgcccaactggatattaacaagaggcttcaggggacatcagtgcatttccatcatggctgccttaccaagcaggttacttcccagcagtcaagctgaactatttggaggaagccttgaagaaggcacagccacctcccagtggctctccataatgctgcacatacggggctcaaattctaagataactcttagaatccaaggacagcctaaaatgttctttttttttttcctttgctgttgttgttcattcattcatttgttttcttttgtttgttttcgttttctttttttttttcaaagacaccagaaacaagtaatgctagtgtagttccacatccttaggttctctttattccagaagcaggaaatttttggctgctgtccaaatcatgtttttttctgggtctcttttttcctgtattaactcttgtttctaatgaaattaccacaaggggtagtaggttcaggcaaagatgtctctgctctgacaaggactaaaaggtagcgataactcttaagtatgtatctgagggaaacttctgcagagtcccttcacaaagaggagggaaatgccaccaagatgaagagctgtttgacgctctatttacatctgctggtacatgtgcagccagaagaaaggcctggtgtggggagccacagggtcttttggaaacaggttgataaccctttttcttttagagagggatatgtttcagaaccagaggtgcctgcctgtttaaatcaacagataaaagctcagtcatcacccccatcccccagaatggcaaggaacagatgcaaatagtgatgcagttgtagcaagctggcaaggaaatgccctgcccatgacaggacagccgccattcggctgaggttgcatgctgacagtgcttctgaattatgtaagctgtcttggttgtaaatgctgacagttgactctgagcatagtaaagaccaaacaaacacatctctgagcagaagaggttcacagactgccagcttgccacctcgggttgatatcaaaaatcacatctagaggtctattcggctggagccggtcaggctggatttaaaggaagatgacattaggatgacgttagtacagagcgggagaggagaaatcatgcccttctcattctcaatttggtttcaatatttacccatcacaacgcagggatataatagcaggtggcttgaacaaaatagcaattgaaagataaaggcaaatcggttgaaggatggcttacaaaagacacttccatgtgtcctgccgagctccactgtggacgagcccaagagaactagatttcttgtcctttttttttttttttttttctgaaagtcagatgtataacttttatgtttttgagcctgtacatgtgcccttaaatgtatggcttcaaatctgtgacactttcccagtttctcttagctatacatttcacagcaatttattctgtcattgagatagcctcgcccccttgttctgaagtgcaggtcacgggctcctacgcagcaggtgggactgtctgtctgtgcacttttttcctaagctgctgaaattcctccgaggtgaactggtcacagcaaccattgcttcctgcatgaccaaagcacaacctccagtggatcagagaaaccaggccagtggttgttctcatggccagaactaaagcacaaagattactggaattaaataagcccaacaaggggaaatgcaggttatctgtacccctgttggcagcataaggctcacaacgcttacactctggctgtgtctaatggtgaacaaccccatgtcaccagcacagtcagacatagacacccatggggaatgtcagaaagccacaagccccacacccaagcacagcaccatttgctccatcccattaacacgcacccaagaatgaaaactacacccatagagaacatgagtatgtattgtagaaatgtagaggaaaaataaaaaatattttttcaaatgtaattacttttaatatatgcttgtggaaggtctaatacaatgtatgctgtctctgtaatttttgctgtaaataactagagacggtgaatacactgatttttctatgtctctgtttaagcttaagactttgtaacaattttttagaggggggtaaacaacaaagataaaaatatgtcctcgctttcttcctgagtgttacgtacctctcagtttttttaaatggaaaacggttgtaatggttcaagcatctggacgggtcatcggtgttaagtatatgcttcttattgtaatacagcttagaaagggacagggctatcaattaactgctccaaagaattcagtattgaagattggcctaagacctacaaactccgtctaaactagacaatatgaaaaaggaaggcttagaaagagactgttgtcgaagtgaagtcgtctttcctcatagcaaatggctctgtccaaatccattctgcatggaatagcttaaggaaaacaaaccctgctttctgatgaacaaaatatttttgtacgtgtttatttcttattaatgacttgaggtcagaccactcatccgctgaagccataactgacctccaccaaataaatgttgtaaagaagctgggggagggttggggagacactgagaggtaggaaaaatcagagatgtggtgaagataacaacacaggcaaaagcagggtaagtgaaactgatgttttccctgcatcccaaatatgacgttaaaaggctagtattttatgatgatcgatttataaaataaaagatgtttagatttaaatgagactttccaatatttttgaaatccctgacaatgcttccttgcttttaggattgagataaatgattttcctatccttctgatgttctgagatttaatgcttctgccatagctccagcctacagtacaaggcgcagagccactgagtccagaggtgaagcccaggactgtccggggcttggctgtgcctaatactctacagctgcacctggaggagcagcctggaaggtacagcttgctcctccttagcatgcaaaccactgttggcagtgcccccaatgttgcattgccacaagtatgtaaaataaaagcattcattctgaaaagctaagtatactttaaaaaataaaaaaaaaaagagcaacacctcctgtagtcaaccactgattcttcgggagctgaattatgctattaccatatactcttaccagcctgtagaggcaaaaggcaaagtacaaataaacccagtgatatatgtagtttttgaatctacaattttctgatttctctctctctctctctctctctctctctctctctctctctctctctctctctctctctctgcccttgtttaatatataagccctaatttctgtgtatgtgagtaaaaactgcagcctgagtcatttaggaagtaagcattgaattttttaattataaatataatagattaaagcagcactccctaacaactaaagagagttttatattactttagaatgtaatggggttttgtccttattttatgtcctgtaaattattagttgaatactgttagcattccagataatgcacacatgatttctgaatgtttcctgtaaatgacaatcaatgtttatgaccttccctccttcaatgctgaacaaattaaaagaagaaaaagaacataaaagtctctcctggtgcttttcttcacacacagggaatgaggaaggagggggtggagaagatagataactggggctttaagaacaaggtcctgcagactctggcttacaaagttgtctttttttccagtgaacgatgggtaatcattttcactggcaattattgtgtctccccatatctgccctaagtgaaaagtgatttcgaagaaaagacttgaagtgaattttgaccaaattgcttaccagaatatcattgacttgaccttggtaaggaaaactagttggagaaatgtttttctaagagatgtacttcctcacagctatgtcatacacttaaaggaggagcaacatctctcaaaagtaacagctctctgttctcaacatttgcagaaaaggcagtccaccctcacctcccccagctgagctataagcaaccccctttgaatattctgttgaaagatggagtaggtttgaaataaatgaaacaccccatacatatgatgaagttttgggtaataactcccgattgagtctctggatctatgtgatttgttgtttcgttctcagtgaagctcactgaagtcagtgttttacagcacacatgaaaccctctgaatcttactccatgccatcctgtagagtaggtaacagtcaacgatcacagtctcaaggcaatgttgaaaaaagtagttctaaaagaaccaatcgctttcagaaggttggagtgatgcaggttgggctacccagagccactcgatgctctggggaaagtgacacagattgaggtttcaaaaatagaattactgactcaatcaacagagaccagcccacctttggaactgataataacccttgaagcatatgccaagcaacatctccactcaggacatgcagatctcagggagccctgtgcagagatcacagaagcagagctacactgggatacctcattcagaatgattttttttttcctagccccatccatttacctgaaaatttcaagattttggtttttcttttaatggttgaatagcattacgttgtataaatgtaccacattttcattatccattcatctgttgatagacatctagcttgtttctaatttctgcctattatgaataaaaccccagggaccatgaataagcaagagtctctgcaggagaatgtagagtcctttgggtatatgtccaaaagtgaggtagctgaatcttgagtagaactattcccagctttctgattatccaccacactgatttttataatggttgttcaagtttgcactcccaccagaaacgaatgaatgttccccttaccccatatcatcgccagcaagatgccatttgttctgttgatcatggcctttctggccagtataaaatgacatctcaaagcagctttaatttgcatttcgctgatgactaaggatggtgaacatttctttacgtgtttctcagccatttgattttcatcttctgactgacctgttgaacattttgagaaagaagtatgtctctgttacccacagctcaccagtgtacagtttagcatagagcccttggtcctgccaggtgaagatctatggtaagtgtctaatgcactgtactttgtacaatcttggctctctcctctctctctcctctctctctcctctctctctctctctctctctctctctctctctctctctctctctctctctctctctctcctttcttcagattcccgctccttctgtcttagacaaccagttattatacatcaggacaggactttcccagcctaccactcttgaactcatttttacccatcactgcctgtgggggttttaaacagcattgtttagtttattaaaactgagacaaaaatatcccttctcacatcttttattcctagttattgctactcatgatttctcagactaagtgcacagacaaacttacatttgtcctatcaatctgcaggaaagggactgaaggacctccctcctggtctgccatctcccaaattagaatgtctgtcatcccaaacatctgtcacagtttagtctgctcataagcacaagttttatttattgaagatcatcagaacaaacagtgacaaagatcaggaacatgggatccactaagaatgccattggggtgaatagtgtgagctgtgcatttagggcacaggttttgttgttgttttgctgctgctgttattgttgtttgttgttattgttttggtgggagagggagaaagtaaggtagagaggacagggctatgtcatcctggctctctggaactcactctctagaccgagctgaccctaaattcacagagatctggctgtatctgcctgctgctaggattaaaggtgtgtgctgcctcactgtaccttagaactagcttctgtggaaattagtattttaaaataaagatttcactattattcaggaacaggaaggtcaagagattgggtagttattgacatcaaaaatgacatttgtagtgctgtagagatgagcttggagaattcccaagctcacgtttaattcccaggacccatatggctgctcacaacactccataactacagtttcaggggatccactgatttctggcttctgaggcactgtgtgcatgtggtgcaccaacaaacatgcaagtataacactcataagtataaaatttttaaagaaatattttcattaaaaaaaggaaacgcaatttataacccatagttcccagaaaggaagacccatcaaagatgggccaatagggagacagagagagcaagccagggcagctgtgagcatgatcctacttgggattcttatgagaaggaacaggtgtgaccaggtaagcaggttgggcactgtccagtttatatgattccagtggtctctagaatgctgagcctttacaggttgtctggtacctggctcttgcatgattaggccaagaagataggggcatggcacccctgagggctcagtaaaggaggaagttggggcctgttttagagttactgctttgcttagagtgggctcccaggcaagtcatttcctgtacaaggaattagctagaccagagggcggaggagaggaaacaacacaatctttctagggacagcaagaacccaaatataaaatatcaaagcatcagaataaaaagacatgcttaatgcaaaattattggtgcattttgactcagtgagaaaacatcttgtccctaaccttatatgggaagaaaagagtaatgcaagttcttcatgggaggaaacattttgagataattcatttttgcgtcaccctctattctctgactctgcattcaggcactttgtaattcctaatcttgaggcattttatgaggtggaaacttggcccctgagctccggagttctttgcccagcaaagatagttgtgtctcattatagtcaccaaagaagaaaatgtctatcttaaggtttgaattgtgaaagaatattcaagtaactgtgatgactgtagtagacagacactcagaaacaatttccaggtaccccaaagtgtctcatgtgagtggaaccagtttaagaatccattgtctcctatctatcaagcaccaatcaataatgtgtccatgttagtatgccagttttcaagggctaaagtctcacaaacaggggactttaaatgacagcagtgtatgttctcacacttttgttgaatgacatgttatctgggttttttcccctctaagaaagttcctatagaggagaactattctaccccttgcccagtatctggctcttcttaagcaatatttatactatcatttatataagatttgcagaaactttgtctcaacatctctctgccttcatcctcacagggcaggctgactgtatacatgtctgtgtctaaattcttcctttagtataaggacactagatctatttgatgacctcctccttttaatttgactatgactctacagaacctgtatccaattgaagtcacattctgagtttctagaagttaagactccagtgtatgctataataaacactgtttatgtcttgtgatttctcactcattcaattagatgatgaaaaacatcaagttgatttcaagaaaatgatggtattaattaaacatcttcattatggactgccagtctccaaatcacatggcatattcttgatgcaaatgacacatatcaaagtagaaccagcgaggcaaagagagggaacaaagctatctgaagaaagtagccaaaggctgtggggaggggtaaacaggtaaattgggaattctaagactcaaacgcagatagccactcccaaacaccccggccctcttctgtgagcattgcccaagaagcaaacatcctatatgacactacaaattcaaatatatactgcaaactttcacagtacctccacagccaggagaaaatatttaacaagaggagagaattgttttttttttttttagttctttaattactactcatatttacatatccaccccccattccctctacctcccatcctgccatgttccccccaaccaccccccaacccattccccaacacctccccagggatagtgaggccctccaccagggaccttcaaagtctgtcatatcatttgggggagggcctaggccctccttgtatctgggctgcaatagtatccctccatagggaatgggctcccaaagtccatttgtgctaaagggataaagactggctccactgttagatgtcccatagactgtcttggcctcctcgctggtacccacattcagagggctttgtttggtccaatgctgtttccgaagctttatgactaggatctccatgctctcacaaggtcaggtccaatgtttctgtgggtttctccagtcccgtcttggctcccttgctcatccctcctccctctccacaactggattccaggagtatagtttgatgcttagctgtgggtgcctgtttctactttgaacagctactggatgaaggctctaggatggcaaccaaggtagacaccaatctaattataggggaagggcatcaatggcattttctccatcactgcttggattcttagttggggtcatccctgtggatcccctagcatttcccctgtgccagacctctctccatacctgtactgtctccctctatcaagacatctcctttcttgccctcctctagtcctcccctgtctcagtcctcttgttttcctccccctccccttcttcccttcccaccttcttcctctccacccacaccccatgctcccactttgttcaggggttcttgtcccctgaggatagaatttgtaatcctcttacagaaccaactgtaagaaaagaaagatttgtagaaggacagcctatttcccagtgctatggtccatcccgggacaccacttggtgtcgcagagactttgttgacaagtcccctgctctgtatgttccattctcaccaaacattgcaagtctaaaatcctgcaatcctcaaacaaatgtagatatagtaccatttgacttttttccaagtttgtaacgattaggtgaaatggggctgactgggagccatgtggtaggcttggtgagcagagatggtaaaaccagaaaagactgtcccacaatagataacctctcttccacctctcagttggcaggaactctcctcaaaccacacatccacatcattgaccagtgaactctgtttgatgataccttaaaattccctgacacatactccagaggctaaaacctgagcacacatagaaacttgataatttttttttgatcttgtatttaaaaccattgtaatctaagatatttctagccctgaatggtgaataaatttttagcactaaaatgaccctttgggggctgatgaggtgcttggcatgtaaaggcatttgctaccaagcctcatgacttaagttcaatccctggagcctgcttaaagggtaggaggagagaactggactccacaaatacatcttctgattccatatgtgtgtcctggcacacatcctctcacacaaatgaacaaataaatatacaaacaagtaagttaataaagcaatcacttggacacactactggtacaataatgacatgatgactaagagagtaaccaactgcattctgactggatctggggcttcctccagggcagagagttaatacctaagcactgtggacctggtcaagggcccatggctggggagaccataggctcaaagggttacccactgtttatgtttcattaaataatacatcatataactggcttcttaatatttacctttatacccatagattagtgttactctcagccttgatcacagcaaacttccttttgcagtcaactgtggttaaagaagagtaatggctggtgaaggtgctaaaaataagtgactgtgagtgcctgtccctcaatggaaaagccctatcaccccttccaaggctcaatgagcatcacaaaagaggaggtggaaaaagagagcatctatcttctgagcagtgtgtgaccattgttctcatggactcacagtgctatgggtgcccacacaagactgggcctgtcatccttcagtcatggataaggaagggctcactggggtgggccttcctggggaagctcttggcagttggtggctgtgggagagaaagagtcattgttttcagtggggtaaccactggtgaattgtccttgctccattggatagatccactctcatgcccactcaggtgacccaattaaacttagggggtcacaaaacaaaaccaaaaacagaaaccaaactaaaaggcataatagtgagaagggtgatgggagactgaaaggaatatatggggatgcacatgaccaaagtatattctataagcaaatacatggatgtgaatcagttaataattaatacataaggaaattaattttagccaggtggccatggcacacacctttaatctcagcacatgggaaacagaggcaggcagatctctgtgagttcaaggccagtctggtctacaaaaaaaatttcaggacagccagagctgttacacagagagaaccagtctctaaaagagaaggaaacaaacaaacaaacaaacaaagagggaggggaagggaagaaggaaggaaggtgaaagctgagtcctactcccaaggcatacttagctcaagggcaggaggccttcgagtgcggtaggccacagtccaagctggtcccatgcaggcagctagaaactgtgacagcaaccgtggggaggtctgtggaagtctcccagctggatggacggttctgagcggctcagcggtgtccgggatgcacttgtgtggtgtggcgcttacatccagctttcacacccttgcatgtccccttacactccagggaagacaaacatctccccagttgtccagatagatggctcagtagaacactttttgtatttacttttttccttttattgaaaagaagttttttttctcatataatatatcctgattatggtttctgttccctctactcccccaagctccttctcatctctcttcccatacaacccaccacctttctgtctctcattagaaaacaaacaggcttctgtgggataataataaaatataataagatgaaacaaaaactaacacattggaattggacaaaaacgaacagaagaaaagagcccaagaaaagacacaagaaacacagaccctctcatttgaacactcaggaatcccatagaaacactaaactgaaaaccattatgtatgtatatatatatatgtgtgtgtgtgtgtgtgtgtgtgtgtgtgtgtgtatatatgtgtgtgtgtgtgtgtgtgtgtgtgtgtatgtatatgtacttttttatactatatatagtcccataggtaaaaagagacacacacatgtgtatgcatgtatgtatatgtatatacaattttaatactattttactgtatataataaaataaaagataattttgaaaaagaaagagccttgaaactacattatgagactaagaacctgcaacgatattgctcagttcattttctgttggcaatctactgcacggcatgcagcctactcttaagagtagtttgtttccctggttagactcccttggaggaaactaaattttcattttcaaatgcttagcaattggagactgcttctgggtgggaacacatgtccacttctcctttcagctcaaagcttcccagagtagacccatgcaggctctatgcaagttgccttagtctctatgagttcacatgtgggttgatcatgttggtttagagggccttgttttcttggtggcctccatcccctctggcttttacactctttatgcctcctcttccatgggtctctgtctttgttcccatttgctacaggggggagcttttctgatggctgtttaaggcactgaattatgagtatagcagaatgccattagaagtcattttgttgcagagttatttgcttacttttagaacagtagtatttagttttaaccctgggctatgtagtctcaggttctgggtcaccaagctgtgtcggtatgggccccatctagtggagtggatcttgagtcaaatcagatattggttggtgtggtggtttgaaggaaaatggcccccaaagagagtagcactattaggaggcatggccttgttgaagtaggtatggccttgttggagcaagtgtctcactgtgggggtgggctcaagttttgctcattgtgacagtcaacttcctgttacctgcaagactctcagctactactctagcaccatgtctacctgaaagccaccatgttccccatcaatgatgatgatggactaagcctctaaaactgtaaggaagccaccacaattaaatcttttctttgaagagatgctgtagtcatggtgattcttcacagcaataaaagctgtgacagttgattactcccacaggctttgtgacaccattgattgtcctaacatattatgcagttagtacaccattgtagatatggtttttgtgcctgacttggtatttacaagtttcttgagttccgcatatattttggatactagccctctattagatacataattggtgaaaatattttcccatagtgtaagcttctgatttgtctaaatgacagtgtcttttgccttgcaaaaactttcctgaggtcccatttattaactgttgttcattgtgcctgtgctaacagggttctgctcagaaagtctcttcctgtgccattgagttcagggttattcccactttttcatctatcagattctccatatctggttctatgctaaagtctgctccattctgagtttagttttgtgcagggtgataggtatggatttatttagattcttctatgtacagctgtccactttgatcagcaccatttgttaaagatgttgtcttttttcacagtgtggttttctggcttcttcatcaaaaatcaggtgttcacaggtgtatgaatttatgtctgggtctccagtttgattccattgactagcacgtctgtttctgctccaataccatgctgtttttattgctagagctcttaagtacaactaaaaattaggaatggtaatacctccagcagttctttaattgttcaaggttgttttagctatcctcagtttttcgtgtttctatctgaagctgaaaattctcctttcaagaactgtgttggaattttggtggggatcacattaactttgtagactgcttttgatgagatggccatttttactatattagtcataccaatccttgagcatgggagatcattctattttctgatatcttcttcaaattctttcttcaatatattaaaggttttttgttgttctgtttttattttagagacagggtttctctgtatagccctggctgtcttggaagatgccctctgttgacaagcaagattggcctctgattaagtgatctctgcctcctaagtgctgggattaaagctgtgtgccacaaaaccagacagagttcttttgtttttcttcaaattagaaacaatattgttttacatgtcaatcccagttccctattcctcccttgctcgcctgccctccactaactccctaccccatactctttcagctccccagggagtgagaggacttccatggaggatctcttcaaagtctgtcatatcatttggagcagggactaggccctccctcatgtgtctagtctgagtgagtattcctctatgtggaatgggctccaaaaatccattcatatactagggataaatactgatccaataccagaggccccatagattgcccagacctcctaactgacacccaagttcagggggtctgggtcagtcctatgcgggtttcccagctatcagtctggggtccatgagctcccccttgttcaggtcagctgtttctgtgagtttctccagcctggtcttgacccctttgctcatcactcctccctctctgcaactagattccaggagttcagtacagtgtttagctgtggatgtctgcttctgcttccatcagctactggatgaaggctttaggatagcatataacatagtcatcaatctcattactggagaagggcatttaaggtagcctctccactattgcttagattcttagttggagtcatccttgtagatctctggtcatttccctagtgtcagatttctctttaaaactataatggctccctcttatggtatctcttttcttgctctcctctattcttcccctgactcaatcttcctgctcccttatgtcctcctcacccctcttcttctccccttctctttcttctaactctctctcccatccccccaagctaccaatttgctcaggagatcttgggcctttccctttctccaaaggaccatgtatgtctctcttagggtcctccttgtttcctagcttctctggcagtatgactgtaggctggtaatcctttgctctatgtctatatccatatatgagtgagtacatactgtggtttttttttttttttctgtggctgggttacctcacacaggatggtttctagttccatccatttgcctgcaaatttcaagattccattgtttttttttttctgctgagtagtactttgttgtgtaaatgaaccatattttctctatccactctttaggtgaggggcatctaggttgcttccaggttctggctattacaaatagtgctgctatgaacatggttgaacagatgtccttattgtatgaatgtgcatcttttgggtatatgcctagcagtagaatagctggatcttgtggtagactgattcccattttcccgagaaactgccatactgatttccaaagtggctgtatgagttggcactcacaccagcagtggaggagtgttcccttttctccacatcctctccagcataaactgtcattggtgttttttattttagccattatgacaggagtgagatggtatttcagagttgttttgatttgcatttccctgatggctaaggatgttgaacactttaagcgtctttcagccattttagattcctctattgagaattctctatttagttctgtatcccacttttaattggattatttggtgttttggagactcgcttcttgagttctttgtatattttagaaatcagccctttgtcagatgtggagctggtaaagatcttttcccattctgtgggctgccattttgtcttgctgactgtgtcctttgccttacagaagcttctcagtttcaggaggtctcatttattaattgtggatctcagtgtctgtgctactggtgttatattcacgaaatggtcttctgtaccaatttgttcaagggtacctcctactttctcttctaagaggttcagtgtggctggatttatgttgaggtctttgatccatttggacttaagtgttgtgtatggctataggcatcaatgttcatgagggatattggtctgtagttctctttcttagttgtgtctttgtgtggcttgggtaccaaggttattgaagcctcataaaaagactttggcaatgacccttctgtttctattgtgtggaacacattgaggagtattggtattagctgttctttgaatttctggatgaccctgggattacgagttccatgctctacctactaagttagcctgggtcttttgtttttccatataaagttgaatattgctctttcaagatctgtgctgggattttgatggggattgcattgaatctgtagattgcttttggcaatattgccatttttactatgttgatcctatttattcaagagcatgggagatctttccattttctggtatcttctttatcttctttctttaaagactcaaagttcttgctatgcaggtcttttacttgtttggttaatgttatcgcaaggtattttatgttgtttgtggcaatagtaaagggtgatgtttctctgatttctttctcaacacatttatcatctgtatatagtagggctactgattttatttttttagttaatcttgtatcctgccactttgctgaagttgtttatcagctgtaggagttccttggtagaatttttgggtaacttatgtaaactatcatatcatctgcaaatagtgaaagtttgacttcttcctttccaacttgtatccccttgatctctttttgttgtcttattgctctagctagaacttcaacacaatatctaaaaggaatggagagagtagacagccttgtcttgatcctgattttaggggaatcacattgagtttctctccatttagtttgatgttggctgttggtgtatattgcttttattacgttgagatatgttcctgttatcactgatctctctaagacctttatgataaagggatattggattttgtcaaaggctttttcaggatctagtgagatgatcatgtggttttgtttctcagtctgtttatatggtggattacattgatggattttcttatgttgaaccatccttgcatccctgggatattggtctgtagttctttcttagttgtgtctttgtgtggcttgggtaccaaggttattgaaaccttgtgaaaaagagtttggcaataatccttctgcttctatagtgtggaacactttgaggagaattggtattagctgttctttgaatttctgctagaattctgaaaccatctgtccctgggattattttggttgggaaacttttgatggctgcttctatttcattaggggctataggtctatttaaattacttatctgttttttatttaattttgataggtgataactgtccagaaaattgtccatttcctttcaattttcaaattttgtggagtacaggttttcaaagtatgacctgaagattctctgattttcctcagtgtctgttgttatgtccccattttcatttctgattttgttaatttgcatgttctctctttgccttttgattagtttggataaagatgtgtctatcttatttattttctctaagaactaactttttgttaaattgattctttgtattgttttctttgtttctagtttatagatttcagccctcaatttgattatttcctggcatctacccctctggagtgagtttgcttgtttttgttttagagctttcggttgtgctgttaattctctagtgtgactattctccagtttcttcatgtgggcacttagtgctatgacctttcctcttggcactgctttcaaagtgtcccaaaagtttgggtatgttgtgtcttcattgtccttgaattctaggaagtctttaatttctttttttttcaattttttttatttgaattagaaacaggattgttttacatgacaatcccagttccctttcccacccatcctcctctaccacccccaaataaaaacttatctgtcacacatcttttctgctccccctggatggtgaggccttccatagggtgtcatcagagtctttcgtatcctttgggatagggcctaggcccaccctcgtgtgtcttggctcagggagtattcctctatatggaatgggctcccaaagtccacacctttgctagggataaatactgggcttctacaggaggtccatagatttctgaggtttcctcacagaaacccatgttcctggtattccagctatcagactggggagcaagagttcccggatgttcaggtcagctgtttctgtggatttcaccagcctggtctggacctctgtgctcttcactggtccttctctgcatctgggttccagttcagtttggtgattagttatgggtgtctgcttctacttcgactagctggtggatgaaggctataggatcagatataagtcagtcatcaatctcataatcaggggagggcatttaaggtagcctctccttcgttgctgagatagttagctggtgtcatctttgtagatctccagacatttccctagtgcctgatttctctgtaaaccaaaaatatctccctctattatgatatctccattcttgttatcgtgtattcttcccctgactcatactttctgctccctcatatccttggcatccctcttcttctccccttctcattttcctagcttcctcccccctgtttccatgctcccaatttgcttagcagatcttgaacctctccccttctccaggggaccatgtatgtctctcttagggacctccttgtttattagcttctttggcagtgtggattgtaggctggtaatccttactctatgtctaaaatctgcatatgagtgagtacataccatgtttgtcttttttcgattgggttacctcgctcagaatggtttcttctagatccatccattttcctgcaaatttcaagattccattgttttttttccgctaagtagtactccattgtgtaaatcatgttggagaggatgtggaggaaaggggaacacttcgccactgctggtgggagtgccaacttgtacagccactttggaaatcagtatggcgactcctcaaaaaaatgggaatcagtctaccacaagatccagcaattccactcttaggcatatacccaaaagaagcacattcacacaacaaggacatatgttcaacaatgttcatagtagcactatctgtaatagccagaaactggaagcagcctagatgcccctcaaccgaagaatggatagagaaaatgtggtacatttaatttcttttttttatttcttccttgacccaggaatggtgtaattgcacattgttcaatttccatgagtttgtagggtttcagtaaatcgtgtttttgttgaattctaactttaaagcatgattgtctgataagatacaggaggttattacaattttttgtacttgttgaggtttgctatattgccaagtatatggtcgatattagagaaggttccatgtggtgctgagaaaaaggtatattcttttgtgtttggatggaatgttctatagatgtctgttaaacccaattgggtcataacttctgttagttcctttgtttctttattaagtttctgtctggtggtcctgtctggtggtgagagtggggtgttgaagtctcccactatgagtgtgtgaggttttattgtgattttagttttagtaatgtttcttttatgaatgtgggtacctttgtatttcgggcatagatgttcagaattgagactccatcttgatggatttctcttgtgatgaatatgaaatgaccttcttcatctcttttgattgattttagtttgcagtctaatttgttagatattaggattgctacaccagcttgtttcttgggtccatttgattggaaaatcttttcccaacccttaactgtgaggtactgtctgtctttgaagttgaagtgtgtttcttgtatgtgacagaaggacggattctgtctttgtatccattctgttagcctgtgtctttttataggcaagttaagaccattaatattgagggatattaatgaccattgattattaattcttgggtttcttatttgttgttggtggtattgtgtatggatcccctttgtttcttttggctgttggtaaagtgggattatctattgcctatgtttttgtgagtgtagttaacttccttgggttggagtttttcttccagaactttctgtaggactggattagcagatacatattttttaaatctggttttgtcatggaatatcttgttttctccatctatagtgattgaaagctttgctgggtatagtagtctgggctggcatctgggctggtctcttagtgtttgtagaaaatccacaccagaccttttggctttcagagtttccatggaaaagtccagacagagttcttattgtacaagtcttttactttcttggttagaattacctcatgacattatttgaccatttgtgaaaagtgctgtttccctgatttctttctcaatccatttgtcatctatatatataagagggctactgacttgtgtgggttcattttgtatctaactattttgcttatagtgcttatcagttgtaggactttactggtggaattttaacggtcacatatatactataatatcatctgcaaacaaagatactttgagctatttttttctatttgaatccacttgatgttctttggttgtcttattgctctagctaataaagcaaagacttcaagtactatattgaataggattagaaagactagacaaccttgtcttgtgcctaattttagtgaatttgctttgagtttcttgtcatttaagctatgggcttgctgtaaactgcctttattatattgaggtattccccttgcctccctaatctctctggtacttttatcatgaagtgctgttagatttttgtcaaaggccttttgtacatctagtaagatgatcacacattttttggctttctgtccatttatatggtggattatatttattgatttatgtatatggaaccatgcctgcatctctgagatgaagcctagttgatcatgatgggtgatcttttgatgtgttcctgaactcactttgcatgtattttattgagaatgtttgcatctatgttcatgaagaaattgatctgtcattttctttgctgagtctttctgtggttttagtatcagggtaactaactgtggactcataaaatgaattgggcagtgctccttctgtttctactttgtggtctaatttgagaagtataatttttttaataggttcttcaaaaatagagcccagatatatcctgaaaacaaatacctttatttccttttcatatagattcaatcagctacttttctgcttgtccccaaagaccaagtataataagttttgtggccaataaaagaagagcaccatgacaccttgccttgtgggagaagtgaagcagagaagtgaggcagtcaggactcagctaagagacatggctgtgtctcttcccctgagcatacttggggagtttgctacatgttaagctttctatgatgcttaagctttcctgagatggcaggtggctaacatggcttctgtccttcaggtttccatagtcaagcaagacaaatagaccagccaacaaatagtttgacactttgaaagatgtatttgaagtgaaaagaagagactaaatctacttggaaatagctgtaggatgaaatgggagatcagaaaatgactgccatttaaactgagtcctaaaaggataaacggatatgtgatgaagaagaaggggagaggagaatgagaagattaagatggtgagagaaagagagaagagaaagaatgagagatgaatgtaggaagaggaaaggaggacagagaagaggagggaaaggaaaagagaggaagaagagggaagaaaaaagaagaagggcaggaagggtgaggaagtagagagagggagagagaagtagaatgcagattaactggcaactgtctcccaaatcttactccagacatgttttgtttagttttcatctaattaggaaattccacattaaatcaacatttgcagattcttttgtaaaacaaaagagaaaacagaaggggtctggcagcacagttccacacaggcatgtggaaacagtgactgttcccaggcaaagcccttcctccagacaggacacagttcccccaggttcctaccttcctggctccacaggcagctgagcatctggtgctcaggggcaggggaagatcagaagccagctgttacaaaactctggcctgcctctgaggaggatgatttttagttgaatacttctataatgctgccctcacagaagtagccatccatgggctaaatcagacagttcttttgttttcccctatttatttttttaaacaaaacaaaccattggaattggcttcagctcatagagactggaaaggaaaaagaagatacactttgtggtgctttgaatagggaaacatccctcatagtcttggttttgaccaagtcttttgaccacttggttcccagttgatgagctctagcggaggtttaggtggtaccaccttgctggaggaagtgcattactgagaaagagctttgaggttaaaagcctccatcactttcatacctctctctctttccctctctctctctctctctctctctctctctctctctctctctctctctgtctctcccctccccccgccctcccttcctctttcctcacccctctctctctctgtcccttcctcccccccccaaccccactgctttactccagatgtgaagatgcaagttctcaaattcctgctcacaccaccatgactgcagcctgctttctcctccctggcattatgaccctagtcctctgcaactataagccaacacacaccttttcttatgtaagttgccttggtcacagtgctttttcacagcaacagaaaagtaacaagtatgtcaattatttgtcttcactaccacctgctcaggacccttcctaatacatagaaaactcagtcctgccagacagtggcgacatacacctttaatcccagcattcaggaggcagagacaggtggatctttgtgagtttgaggccatcctggtctacagagtgagtcccaggacagcaagggctacacagtgaaaccctttctcaagaaaccaaagagaaaaagaaaactcagtcctgctgcaacttaatggctgaaaaagaactcagctttcggggctctccaaaaggaaagatatacatgtggaaatatgaaggataaatcaaaacaggagccaataagatcatgaaaccagtgcacttataggtctgtggcccataaactccccatagcagggatgtctctgtggagctgcagaacaaagtgacaacatagactttggactgttggccattcaatgagcaatgtgcacttgtattggttactgttttcatcatcactatgaccaaataactaacagatactacttaaggggcaagggtttattttagctcacagttcactgcagggaaggcatagctactgagcagattggtctgtgacagtcatagcttgctgccactggttacatcacagaaagcaaggtacttgagctgggaggactatccaggtctaatcctctaggcccaatactaatgttctgtgtaagctgaacaagttccacatcccagtggtcctataatcttccaaaacaggccagatgttggtggtgcacacctttaatcccagtgcttgggaggcagaggcagatctctgtgagttcgaggacagcctggtctccagagcgagtgccaggataggctccaaagctacacaaagaagctctgtctcgaaaaaaaaaaatcttccaaaacagtaccaacaactagggactaaattttcaaacacatgatatttcatatctggacggttcatatataaatcataacagcaaccccatacactcccagtatagtcaacttcaagaggtttatgaatgatgagaatttaaatatttcccaagaaactcactgatgtctagaagaggtttggctgtccacagggagggaattgtacatgaaatctgagtctcataagagaagaaaatcttgataaaatattatttatacaagaaatctattgctgtttaaaataaaactcatgtttaaataaaattattttattaagtttcaatgattttattaagttattttgtcattcaatataaatttctgatgaaactgtataaattttgtataaggatcaacaacaagaaagcgagaggaggttccccacccacccaccccaccccgctctctagctttttgcttagaaagagactcctgataactcaatgcaaaaaaaccagagggcattttctctaaatctttgtgtgccttgtacagtgataatttactataggtaaggctatggcaaagtacccgcctgttcttctgattgctttttgttaatgagggcagtcttacctgcactggcattgaattgcaacatcttaccagctggcctaacagctttggtccataattcacctgctggctcctgatgctgctgcctgatggatgtgaatccccaagcttcccatgccattcccaatgatgcctgtagtaaaccttgtgtctcacactgattcacccagtcataatcctgccgtcagctgggatgaaatgtcttcctcaaattccccagtctggaggttcctgccaagtcaacaatggactgccaggtggctgggacttgagcgagcatctgttcagctttgtgttggaccaaaatgaccattgggaagctgtattacacagatgtgttgttaggatcagcaggggaaaaaaaaaacactccagaaaactgtatgttatccatttctaaataaataatacccgtgtttccagtgtgcctctgagcccatcatcccatatctctttttacatagcactgattatgaagaaaacatttgatgaaggtgaccaagttatctatcaaattgaatcagctgatgttcactgcatacctcacacaataactgcagggaactggtgcagagttcttcacagtttcgtcactcatgtgtgttcttcatctgagcatcccagcagcctataatgagaaaactggtgtcgcagaagatcaatgtttgcaggcaggcaagatttccaaacttcagctgtgacatgcaacttcccttcttaaaaggaaaccaaatataaccgagagatagaaggacagccttcatattttaatagtaccagaaattcaagactgagactgtttatcaagttactaaaataatttttatgccgcactgcagtattcttatggcagtctttccctggtaaatctgtgtgtgctaacaagttatatataagaacataggagcacttacatatttactaggaactgtcaaaaagacattgttaagagaagttcttgttgatacataaagagaaggaaaccatggagtatagttgatgaaaagaattggataactggataactatcagagagcaaaggctaatgagatggctccatgagtaagggagaggaagcttgaggacctgagttgcatcgccagaatctatgacatagggagatagccaacccccaaaagatgttagctggcttccacacacttcctgtgcacctgtgctacccaacacaaatcatacacacaataataataataataataataataataataataataataataaatttaaatataagagagtagagataaaatcatcctgtgagaaaaaattctttttaatttgaatagattttaaaaagcagttttttgtgttttctagaaatagttattgtactgggctgggggagtaagggagtgggaggaggcttaggggtgggaggaggtgtgggagggagaattgtggttggaacgtaaaatgatttttaaaaattaaaaattggtaaaaagacccttttttggttttttgagacaggatttctctgtgtagcctttgctttcctggaactcgctctctagacctgactgccctcaaactcacagagatctgcctacctctacctcccaagtgctaggattaaaggtgtgcaccaccactgcctggcttaaaagacatttttattaggtagctaaatgaattagtgtgtaaaaaatcctcatctttttaaagtttcatattattaagaaatgacgcagaataagaaaactcaaactacagtgtaataaatgccataaagtaacagaaaaaaacagcagacctatatagacaaaattataaacacatacattcaagaagatgaaggaatgaattgaattcccaaaggggaaagaacaggataaacaatggaccataatgaactaaaatatataatgaaatgacaaaaaaaagttactcatgtaaataatttttaagagatgtactgtctccttttaatgataaacttatgaatttgtttattttttaaatatcttaatacataatgcttcaaagtagaattttaaagatggttggaaaagtggaacacaaggtaatgaaaaactaccctagagaaaagaaccatcaagatggctctgcatgtgtgttagtttggttctgtcaatgtaataagcaccatgaccaaaggcaagttgtagaggaaaggacttacaggtttggcttacagattaactgtccatcatcaagagaagccaaggtaggaactaaatcagagaccacagaaaagtgctgctcaccagcttgcttccaggatacctttcttatatattccaagcacacctgcatagggtgggcacttcccacagtggaatgggcactcccacactgattaacaagcaagaaaacacccacaggtcaatcagataaagatgactcttcccaggtctgtcaagtagacaagtgaagctaataaccgggctgccaacctgacaacccaagtttcagtctctgggacccacatgataggatgaaagaatgaagtcctgcatattgtccctgatctccaaatgtgcactgtggggagtatgagtgtgtgcgtccacacacacttgcgcacacatgctcaagcgcacgcgcgcacacacacatgcatgcaagcacatacacactaaaaataatgatataactaatttcttaaaatcctaggtaaacactaacaaaaatattttatgtgtatagaaacaataaccagacaataaaagaattcaagagaatgagaagtaaactatctaatatttcaaaaaaattacaaaaccacttagagtagtcaatactggaaggtccctttatgtgcttcaccctttacttctaaaatatattagagttctaaggaaaaactgaaaaccacgtggaaccaagtgctcagatactaaaagatcaaataagtttcttccaagataatttagaaaagattgtaacaatacagttaacaaatttgatctcataagataaatacttaactctgtacccaataaactttaaagtgcacattattctcaaacacatggcacattcattaaaaatgtgtcttctgtcacaagtaaatattcaataaattccagaaccaagaaatttttcagctgcatgaggagcctactaccaccaaaaccagaaaattgaagcatctagacgtttcttctaggtaatacttagattgaagaagaaatgaaggtttacatttaaaatgaatttgaatttgaagagatcacgagggtgggaacctgtgataccatgagtggctttatgtgaagaaggaggagcctgaactgaacccaccgcactgcaatgctagcacaatactcagttgcatcccagcctctagaaacatgagtcgaaacagtctccatgctttgcaattacctcacctcaagaagtttgttatcacaacattctggtttcctttctgttgttacaacaaaccactctgaccaaatgcaatttaggggtgaagggattaatttgacttacatttctagcttgcagtctgccacagaggaaagtctggacaggaactcaagggcaagaaaccatggtgaaaagctgcttgctggctcaatcataggcagactcatgttcagctagcttctttatacaacccaatctgcagaaaagtggttccgtacaagtagactgagcctgtgggcacaaccagatatgacataagccaatttgatccagacaatccctcaacccactttcctctcagatgactctaggctaggtcaagttgacagctaaagccaatgggaataagcaacatttcttcatctgctcaagcccttccagcggtctccctcagagttaatccctgatagccaaggacctacaagcaacaacatgacacacattcatacatgcatgctgccaaaacattcatgaatataaaatataaataaacaaataaaaagatacatgattttgtacccagagacatccaatggatatattggaattatttctccagtttttgaagagactgttttttaaaaatctcatcctgtatagatagtttttaatggagggatttaaatttattatatttattggcacaaataattatttcattgaccgatgtctgtattttcatatttctattttattcagcatgactgtcttttgtctgttggttctgtcataacgtgtcagatgttcatcttaggtcaagtcacacccagcatgtgtgacttgtagaagtacaatctgaactgtagctaggcagtcttttaaatatgtcaacagtgcttatggtagaattgtttgtgtgtgtgtgtgtgtgtgtgtgtgtgtgtgtgtgtgtgtgtgtgtttgtggtatgtgtttatatgagtatgtgagtctttatctaatcatcaataacaaaatcaaagtgattgattttttttttctattttccttaaagcaatgagcctagcattttgttttaaagatctattcctctaccctatcttttcttttatctgggcttctggttgatatcaggtgaaacattctttttttagtactgtgttttgtaggtgagtggaataatcatttgggatcatcgatatcagtttctgtgatcatgttagcgggttagcagaggtaacacagcatgtcactaaatgtgaaagctagagcccgaccctggcggccccttgaacacggtttgagcatgcaaatgagtggacttttctgtgcctcaacttcccgcttagcaacagggatcaactgcattgctatcagattaactcaactgtgagtgctactgatttgtgcaaaataggtttaaatggattccttcgaatgcccaggagagtcccagcacatagcaaacactgtgagtgtggtcattgtgagtgtgatgattgcttccttctttgtgatcgacttcgttttcagcatcctgacaaacaaatatctacaagagaagagttgtctcactctctctcaggctgagttactttccattttctcataagaaatttgtgagctataggattcttgaataacaacgattaatttttttcttgaaaataacattttattgtctccattgaatttcctgtctcataggtcaatgtgcttttccctgttgaagggaattttcgtatcttctgcgattgcgcggtagattcaataaacattcactctgtcaattccttggactccacagtctgagcctatctgtgtgtggggggtgaatatggacattatgcatatcagagtctgtatatccgaaatctgtagcaagacttcacaggtgcgtcctacctgcattctataaagactagttgaaaagaaccctgccttttaatgagtttaccattaaaaaaaaaaattgggacaccgcctggttccaccgtgttaaatgaaaataacattcagagttgagttaatctgattgcatgggatctattttcccccttgctgcaaatcagagcagttttcagctaacaagaatgggtgccctacttgaacgggcagcaggcaatgccgctagtcagagcggcacttagcatggcattgccatcattacatccccaggttcacagcaatgaaactccaggagtggcaaagtcaaatcagttcaattgtctgattgttcatactcataaagtgaggaagctggcaggggtccggcataaaacttggagttctgcactggagctcctttaaggtaattcattgccctctgtagtagcttaaatcagaggggccagcacggtcacagtgaatgcagttccccatcctgctggagagcaatatcgcagatagccggctgctatgccagatgtcaaaggtgcactaaaagcacttggttttgatctgccccattcctgagaagtacaatggatgggcctttaagcgccgccataaaaaaagattgtgattaatgaagcagcacaagttaataaaccacgttgactccggcttccttctcccaggcatttcactgtccacaaagcagttcttttacttagcagcagggacatgtaaaatgttaatcatcaatctgtgggccattaaagaagttgctttccctttctcaagttgaaaaccaaggggggaagataataggtttggttaacagagccattcacataatggagatgtgcggagggaagctttgatggagtcagcgtgggagcccttgagcattaatccatcctgctctcgggaccacaagttcaaatcctagctgaggctgcaaggctcagaccaggaggctggggtgagtgtcttgaaggcagctgaccagcaggaggttactgtacctcagtgaggccaaaaataagatgagatggcatggaagctctctgtgtcagcagccaggagccaaaggctgctggtgctcactgacctgtgaacccttcttcctcccagagagcaccccagcatccctgccaggaaggcgagtggctatgagaggagccctgggcaggagaagttctcttaccgagaggacaagacagagtttcagctaattttccaaacctaattaaaatactttctcggagactcaagaagagtgcatcatcagagagacacaatttgaaattttactcatgacaaagaaattgctttggatggggggcaagggttggagatccaaacaacagacaaatggcccccaggggttttacacatcagtcagttaatattagacggaacagaggaactactggaagatagtgtcaagtcaggtaggacattctgaaatagttaggctcagtagagtgatgtagaatttaggaacagtgtttctcttctataccggaggcaaattttgtcttgccttaggaagaaaagcttagatgggtaaggacctgggtttgatccctagcacaaaaggaaaaaaaaaaaaaagaaaggaagaatggatacttagactatgcctcagacaaaagtagaagaggaaatggctcctactcctagaaaaaagtctatgcagagatcactatgagaggggacaagtggtccctgacattatcaggaatcgtatttgatcaacagaaatgccacttccctgctagagcccttaacctccgattttctttgcttcttctaaaatttgacagtggcaaaaccattttccatcttttaaatgcagtcacacatacagtgtttttatgctatttttctcaacaaacttctcctcagacctagtttcagaccttgtaatccaatgaaaatcatttttattcgttcctcttgtccatttagttcaagggagattaaataccaaatgtatgacactcagattcacagactacagcatgaaagccataagagaagtaccaacaactttgaaaatcagactgtgaaagcaaggatacttggcagttgtcttagtccatgttctgttgctatagcaaaatacccaacactggataatttataaagaataaaaatttacttggttcacagtgatgaagattgggatatccaagagcattgtgccagcatctggtggaggccatcttacagagggcattacatgcagacagcaaggatgctaccttgggcctctctttttcttcgtacggagtaacttataagaaataggaccctaccctcatgaccttatctagacctcttcagtccttaaagcttccaacaggcctcacctccagatggtaaaaactggagtttggaattaggattccaactcatgaaattaaaggacaaacccacgtctcagtggtagtaagtatatactgggcccacaatcttcattattcatggaatctgtgaagaaacaaggatggtaaatatctatcccaaagcagcatgcattctaggcttccactcagcttccaatagccactccatggagcagctagggcagtgaccctgatacatggaccacccccatcaaaccaaagcacttcttgctgagcatcctagtcccaggctcccaaggtcttctctaggaaaatttctctcgtccacctcagatcttacacactaggtgccaacaggagtatgtctgcatgtgctatgcccatctctctctgtacttagcaccgtgtgctgaggcacctgactggtagtgcatgtgcccagtacacacattacaaccactttgtatctgtgtgcagtaaaactcgtcaccagaaagggagccatataataattgaaagtgtaaactagcaatcttctctttcttctcttggacagtgtttccaaagattcactcactaagcaataaattagcatccttttctaaatccacatctgacatgtaattcataaaacttacatcagacccataaaaagatgataattctgatgatggcatgaaaagaaactcagaagcaattgatggtattaattaattaaagagcttcaccccaaacctgaatagctgtgggcatttgatttgccattacacttctaaggcaaggtggtttatagttagtggatggcttgtaagtgtttcctgaattaattaactgaccaagaatactttgtttcaaacatttgctaacatccctaacttgcatgttacaacttaatgcctcctatctgagcatggtggtacatgattggaatcccagaactcaagactatacaaagaggcccagtctcaaaataataaagccaaaataaacaaacaaaaattaacatctcatgagtgtacagagattttaacatttgtcaattcttctagcttcacctcttgctatctgaacctacattacccaatatgtgccttaagaagtagctgaaaactattgactattcctcaaatatctgatctagatgctctttcttctgccaggcaaactattccttctcattcatcattgttcacttgactcaaaaaacactttagcaaaagtctcaactgtacctcttggttcaaggaggtgttctgggtatctattttctcaagatacataattatctgcctaataatcttagcatagtgcctagaattaatcttagttaaattagtagctcaatgattaaaccaattgagtgatcaagcaacagctggggagtttcaaaagtatcacacctactgtcttcctgagctctgggagagctttgggtggtctaaacagactgattttcacagtaatacctaagatttctttcagtttccaaaactgacaagttaaaacatcttaataaaatggtctcatctcctatccgcacttctcttcaagaaatactgcatggtgactctttgtattatttgaagtgtatgaatccatgctatcagatttccactttgtggaaaacgtgtgtgaacaactatctctcttcagaaaagtttgtcagcatctgtctcgtatgtatatccacacttcccacctaccttctatgttaactcctgccatggtgaaaatttacactggtggtggccattcagtgtaggaaatgaattaacattctccccaggaccctcatttgtatagtatattaataggctccttatgtaaatgtctgctcttacctcactgcttatttgcctgctagctgactgcatgcaattcagaaaggagggcaagaatgtctgctttcacacttagagccaaggggagaaggtggtgggggggggaggcaagcatggaagggatagggacaatggacatattttatggctgtcaccaagccaacagtggttcgataaagccaactttcattccacatgggtatttgtgtatgtgtccaacagatttgtcattataaaggaattatgaaaaccaaaagacaattaaaagtgacaagattttaaagatgtctagtcaaagggtgtcttttgattaacagagagttagaaaagtgttccatgtcttaaataaagaaaatagtctatttagcacttctagagaaaaaaaaaatctcaaaaggtacactctacctctacaaacattcacaacaatcatgcaaggaattggaccagaatagataacttctaatttgacaaagctgccaatcattcatcaaactccctttctcctctttgtcttggatataagtgctacaatgcatttcctaaactcctctgcaggtagatgcagtcctctgactgagtttcagttaatggtatgtacacacaaaaatagtgtgcctgttactgggatagtctatagatatcctcttgggctgaggaatcccagagctgccttggaatccctctgctaaaggcagtagaattcccccacgccccaccccctcccccacctccctctctctctctctctctctctctctctctctgtctgtctctctctgtctctctctctctctcaaacacacacacacacacacacacacacacacacaaacccacttaagttatactgagaccccacacacttatggtcatagcccagggtgtataaggaaggtggaacgtaagttttcacaatggtactgtcaaaacgttcaagttaaatctttgaacatcattgaagtccacgcccccagaatcttttgacttgaatcgtccatcactcagctattttcacatttcagtatctgcttattgttttctcagctcacactaaccctcccagtcctgtcattgtgggtgctctatcattaactaccaagatgaaagtttaaaacaagaaacagcttccccacgaatcttaggttaaagataattttggtgaaaaacaaaataagctgaattgtaattattggtttcccatcctgcctattgggccagcttataataggtttgctatgattctctttaattcccttaacagtctcgtctggtgtgcattagattacaagggtgaatttacagcatacaaattaccttatttctctaaatcttcacatgggtctccctcagtctaaaaatggcaaaagagtcaatataaataaatggaataaaaatattttaagtcttttcacttgaagtcttccatggccattcaaacagctattttccattttgtagataaatattcacatgcaaataatttaacaaggtatcatttttgcagctaatattctaaagatacatacttaatggttttgttttctctgagaaatcataaacaagaatcccacctgacacacctcagtgacactcttactaagatcccaagctagaaatacagtcacatcaacatgtaaatatttttggtaacacaacagtagcataatagtattcactttaaaattcgaatgtggttgttactaggctaactggtgttatacgggccctgagttctagtccctctaccactagattatctttgggtgagtacaatctcttttttgtttgttttgttttctttttttttttcaagacagggtttctctgtgtagccctgactgtcctggaactagctctgtaaactgtgatgtcctagaagtcacagagatctgcctgcctctgcctacctagtgctgggattataggcgtgtgtcaccacctcctggcacacaatctcttttgaaacctttttgtttttcatttcattttaagttaatttttatttaaattaaaaacaatcttatcttacataccaatcccagttccctctccctcccacccttccattcccctcaccaatctccatcccacccccacccactctttagggggggtgaggcctcccatgggagatcatcaaagtctatcacatcatttggggcaggatctaggccctcccctgtatatctaggtggagagagtatccctccacagggaatgggcttcaaagccaacttgtgctctagggataaatgctggtttcactgccagtggccccatagattaagtccccccaactaacacccacatttagggggcctggttcagttctatgttggttccccagctgtcagactggggtctgtgagctcccatttgctcaggtcagttgtttctgtcgattacaccagcatggtgtaatcttgacccctttgctcatcactcctccctctctacaactggattctaggagtttgaaacctttcttatctgtcctttgaactctagctttttcaaagtctcacattttctaattctccatatctgaggaaatttgtatctcagttgtaaaactgatgacattcctctatctatatgtgcagcctactagacgtaacaggaagagggaaatcagtcaaaggaagaggtagggagggagggaagggaaagggggaaggaagaggtggtgagaaagagaaatgatgggaaaccagtattcccccaagctggcctagttttcctgtggctcacagaagtgctgtctggaatccaactgccctctctacaatcaggctgagagattgcagaattcagcttcttcattcccaccagcagcccattcacgcaggggaaatgagagagagaaaaaaaaaatcatcttggcaccagtcactataggtgcatctgcctttctttgtcctggctcttcaagccatctttctcactagaaatcagcttctgagaccaatgggaacattgagggccaggccaataaagacattgcaggtttcatacgttctgtgatttcactctatactgataaactagcaaggcactagaggctatcaaactgttggggaaagaaggaaaaggcagagttccatgtgaaggcagaaaattccccagcgagtccagtgccagggttaccagaaacaatatacccatcaccctgcacctctctcatggcatgccaagagaaactggctggcctatggacttaaacagatgtcctgaatgtgcaaactgaacccattagaagtagagatggtggtgggaaatgttctacaagtccagtttggattttcttatctgaaggccaaaattagaccccaactttcaaatctgtatttcagaccttcacagtatagcactaactgtgctagctaggaccatgtaaattactgtatcagtgatctgctgcaggttcaaatctcagctctccctggatggatgatggccatcaatgccctacttatttataaatagtgattttagacctatataatacacataatggactcaatgaatcagatcattgtatagatataatgcattttgcacacagtacctgtgagataaggaacattgggtgtatcacctataatgatgctgtcattatggtgattttctgaccaataatgagcatctatgctgcaaattcttaatttgtctggaaaaaaagcttgatgtaggatcagatttcatctatccaatctaatcttagtgtcagtgcagtataggaacactcataaaacatttctagaataggacagacactgaacaatcaaacaacccaccctcacccctaggatatatctagaagtcctctagaagtagacagcatttcatcttacattgtttccatctgcagcaggtcttccaaacactctgcttcctcagagaaaccattcactaggccggccaccatccatgacagttacctcacccattgtggacacagacttggccactgtccctccacccaccacctctgcttcccccagtcttcatccacacatttctaagggtgatctggaaattctaaaacatggcaacacactgaaggtttcctcttgttaccaaagcatcccaaggctctgtgaccggttgcttggttaccaataagatacagagcaaaagattcattagaagctaaagtacaagcccatgatgccaatgaagagtcccccccaaatccttccaacaaaaggcaactgttatatgcacatttagacagtcattagcagaacagtttctgccataataattgcaagagctttgtaactaattcaatggataggatttctaagggtctacagtaaatgttcccttggaggagatgaaagctcaaaggactttagttgctaaaagaagatgtgggtgagtgaaaaaccaaaattttcttattaccaaccagctctgtactgacaaaatttaaatcatggcttataaaaacttggggaaaaactgctttgcaagcatcaaactccctatcttctttctatcttttcatgcctccaaaaataacacctaggatggtgccgctttgggattgatttcttgtgctaggatgctttcttcagacagaggatggcagaacaaacaagacaggtaagtctagagccttcaaagagcaaaggagatcggctgggaactggcggatttcctgatttgaaacttttaatcttgaaaccaaaaagggagccatgagccttttccctctagaaagggagaaagagcaggaatccttttgtgcttgtgaaagaaacaggtccactgagcatcatctgtaaatactcaataacgatcacatcatgccaaaatgaaaatctctcactatttattgaactagattccaggctcccaagcagtcttttaagtgggactctctaaggaccttctaaatgctgtctcagtgtcattcaccttcatttagaagttaagtatcttcatcgccatttcagagttaggggttaacagaaaggttaaacaaattatataaacttatattaaaagtctgaaatgagagagaccaaggtgtatgatcccatggggatggcattctttctatgaaaaattaagcaacatacctaattatttttaggatagtatattttatctgtacatagcactctacaaagaaaaggcaaaaaaataataataacaattgtgttaactgcacagtgtctcttcctgaatccttgctattttctgtcccaacccatgtggcttgagatttgaaatgctatttaagtctcaatttccttcagaagctaacctctgtggaataaaatgctgttaaggggggaaaatcttttctgtcatttgactttaacttatgataaattagcttcaactagtttcttagaaaattgcccaagaaatgactacagaaaattaaataccaagacttcaaagaggcaaacacacagccttcaaattccgacctcagagaataatcctccctttctcgtgctttggtgagatgcaagtaaagaaatcttactagggcatggtaatgaaccatctttcaaatgacttttctatcaatctgcttttcaaagggtaataaagtgatgattatttctaggcagtttctgggaagttatcatctcattttaatagtcaccaggaaaggactgcactcaggcattatcaccaatggtgataagggtaagaactggttaagaattcaatagacaaggtataggttgttaaaagctatttcctaggaaattaaaacagacagacatcaaaagaatcatactgggtcttaaagagttggtagtcatttccttctaggttaaaaatgtagatatgatttactacctagtgaatgaaattcactatcatttgaagattgtgctatttctttttaaaaaatattgttggcctcatgttgtgagccaagtcttatacttgatctgatgaaaaacataagaggacctgagaagggcatgtgtcattacttccaaacccagagttttggctctcatctaaaacaacagtcagcaacaacaaaacattcattaagtactgactggatggttattgggaactcttggcatttgttttacaaagtcagagtgaggaatgccccaaattatattaaatctcactcctctgagatgcgtgccgccttaagacagcaaggggatgggcaccactcagaatccagagatggaaagtccatttgtcaggagactccatacactagattacctgcacaggaaattcctgatctcttctcagaccctcacatccagatcccacccagaaccaaagctctgcacataggaaaggattgtgtggttcatcttcactcagaggtgctagaatttccatgtcttctcatttaccctaactcttcaatcacaaccggagcccactgttctagcagggagggtacaggaccagtctccaaatctgacatctgcctggaagtcaaatatctcaggacttagtagagatccaaacttagaacaagaagaggaggaagaggaggaggaggagaggaggagaagagtggaaggaagagagagggggaggaaggaaggaaggaaggaaggagggagagaaggaaaggaaggaaggaaggaaggaaggaaggaaggaaggaaggaaggaaggaaggaaggaagggaaagaaagaaagaaaagagacatgaagctgttggagagcaattatttggatctcacccccacaatctcaccagtgctgctgctgagaaaggatgcttcacaaataaccactgaagaccattggctaaacaaccaagcactgcattctcttgtgatcacaagtcactcagtcaacactgtcacatcatatgcaagcaatcccagtgatctttgcccagcagttctttttttttcaaataatattctgtagttgtttttcttagtgtttgtttaaaaacaaaaaagcacaccacaaaagtttgcaatcaagtgtttgtatttgctttcaagtttcactccagtttacaggtattttggtcaataaattggtgcatttggtttggcccttgcataggtaaactctgccctttctagagttgagcacagcactgaagtgagaccaacagatctcttaatgatttagagactggacaatactgctaagcaccaccccccaacattattaatattttatcctcactgccaatcactgtctcatgcaagcgcatacttaaggggctgagacaagaggattgggagtttgaaggaagtctatgctacacagaggaaggaggaggaagagggaagaaggaagggagagacggaagacagagataagaaattgtccaagtttcccacctcctaccaatgaaacaaaacagaatacagatgcatcctcaaaatcacatgaaccaaatacaatttctttccaccccaccatgcaacacttcctctgaagtgcagcctaaggaagcaggagtccagatttctaaagtagacttagaagtcagtcaacgaatgtaagtactaaagacaaagataagctgaaaatatttaggcctaggaagtttactgctggccaatgggaatgctaagaggggggttcggtaggtggaggggaaccatctctcagtcccaggcttttctgttgctagtgtaaaacatcatgcttgttccgaggcagggcaaccatacccagcatgcaacagggagctgcccccaatgtaaggttgcttccagggacaccttccttcaagctccagaaactgattaagtgttcaagccatcagaatgctgcaaaggaagaaaaaaatacatgcaagacgtttcaacctgagatgcatctttccccacaggactggcaaaggagaatgtagatataatgggatacagtaccaagagggagagaacgaacagagtggcaatggtctctaccttagtgtcctgagcttaaaaagtgaaacctttattaatagtttgcaggattacatatcctcatttttgcctttaaaaaagtaaagggatgtaaggaaaattaatttagatttgtccttttcctttgttccaaggaactgaaagagcccaagcatcatgtgatttgatgacataattcaaagcatctagagtctaccagtctacttggactttttaatggctatttctgctccagcctgggttaacagacattcatcccagtgtcttccctattggtgctattcaaaccttgtgctgctgtagacggaagaggaaatcacatatattcttaatgtatgcataggtatatgaacaacccttggatgaaatgatgagatgactagcagtagggacagagtctgcgaacatagtgaaaaaataaattaattcgtcccccagttcttcagtgcacagcattctactccaacagttccaagcggtcagctgaagcaatgaggtataaatgaaagtattcctggtgggctcatctggtgtcttcatgcagaaccaggagatgagaatgtatggcaacattctgctcagaggtcaatacccaggaggaaccctccattagacactgtgtcctctgggcaacgaaagatgaggctcaggggacacctccagagagttccacattgtaaagccatcctgacagagattctgacacagccagggtcatgtcaatcagtgtacatcacctagagttcaaggcaaaaggagctaagggacctttagcctctttctcatcaccctttctataggcgtgtgtgatcttccagggaacttctattcctgtctcttgctggaagcccctcagctggttcaacgtttttctcaagtcctgagttgcaatgtgccctcgcaagggaataatcatttctttttaaatctacaaagaaaacaagacagtcttagtagatgtcttaggatacattaaatcatgcagatggactgaacttcaggcttagtcaaagtattcagggaaggctctggccaccacctagtggagcaaaatgtgtctgaccaaaattaaatgaggcccaaaaaagacacagtgttagtatttaggcatttgtactggtctgcccttgggaggctcagctggagccactaagagcaccactagtgactattcactacattccctttcaaaggggccctgcccacctcccatccttctctctctttctctccttctctctgttttctctctctgcctctctttcttctctcccactactcctgtccccctcccctttcctctttttatgattcttttcccctaataaaaaaaaagccctctgcttgaactctatctttctctcctgagccgcttttttttttttttttttttcaattacaacacatgggaaccttaggaaggaccagagggatgagtcaaattgctgactttagattccaaggctcagctttctaaagaaagctgcccacatctctttgacgacctctaaaagcttcatcaagctggacagtggtggcacacaccttcaatcccagcactcgtatggcagaggcaggagggtctctgtgagttcgaggccgacctagtctacagagtgagtaccaggacaggctcaaagctacagaggaaccctgtctcgggaaaaaataaaaaataaaagcttcatcaatcaaaggtcacatgagatgtttcttaagcccttccccttccatttaaaaaggaaattgaaagaaaattctaaaggatcatctttgggaggaaactataaggaagggagcattgaatgttgaatacatctttcgtgctgtgattcacgagtggattccagcctgcaaatgtggggttattcggatattcatcacttcctgcctccctcatttagagctctgaccaaccccaaccccttcctggcttcctagtgaccagtgcagaagacacctgctgtacatcaacttctttgcccatccactgtgagctcattatcaagggcagttataagaggatagccttgctcttcgttctattaattagttagcctaactgggctcaaggactgggagctgatgggtgatgggtgtagggaaccaagattgtcactcaggggttgactgtgcagatagtgtgtgtgaagccctgggctccacctttggtgccaagaggaaaacctgatagcttttgttttacttttttatgttaaatggtgatttttctagacgaaaacattaacatatatataagcatatataatatatatttaataatataaccaacgtttactgaccatatacataaaataaatcttcacaccaactttgtaagacaagtacaattatctcttgcttgcagatgaagatactgaaggccaaagccttatagccagtaaaaagaagaacttgggtatattagccctgcccacctgcctgcctggatctagattcaaaattcttatgcattgccttaatgtgcctctgccttaaaaataaatgaaacatgaagacttaaatgtacttctaattctattccccaaaccaaacatttttattcaattgccaatgatatgaaatgatagtatttctttatttccacttcaatattaatttttaaaactagagttttaaaactacagacagagaaatctgagtgagcactcgagaaattcttgcagtttgtaaattattcaacaatttgagtgagtagggatgagagaatgttaaaaggaacaaacttacatttcactaaaaaacaaaaacaaaaactgggtggtgggatgactcatcagataaaggtgcttgctgccaagcctcatgaccagagttcaatccccagaacccacatggtggaggaagaaaatagacaattccagcctagagcctaccatggcatgcctacatgaacccttaaccatactcagcaactaactgggcacaaagattggaagcaatgagtctccctggcccctggctgatcagatatagacccaggtcttgaagaatagaagctgctctgtccaggctacagtgagtcagactgggcagagtacaatgcctaaggatgatggttcctgagcagattctagcacgaaactgtgggaggatattgtttgtttttgttttgttcttttttgtttttttgagacaggatccctctgtgtagccttggatgacctagaactcactttgaagaccaggctggcctggaactcacagagatctacctgtctctacttcttgagtgctgggattaaaggcatatgccatcaatacccagtcaatgttattttttgttttgttttgttttttatgttgcttaaagaggcaatactattgtttacagtagcaggatctgggactagtgagatgtctcagctagtaaaaggtggctccccacaagcctggtgactgcaatttgatcctcagaattgacacattagaaggaggaagtcacatccccacaagttgtcttctgacctctttgcaagcccagtggtgcttgagtacacacacacacacacacacacacacacacacacacacacacacacacacacacacacacttcatcaaaattcagtgtatgagggctggaagtgtagctcagtggtagattgctagcctagtatgacaaggtcctggattctaaggctgctgctgtaaaacaaacaaacaaacaaacgagctaataaagggtcaattgttacaggataaagtaatgctttaactgacagtctttccttccctttgggtcacaccctctctggtgcccaatgagcaaactggaacaggataaaaatgctacaggcatgcagtctgcaagcaaacaggacctgggttggaagagaggaatggggccttccatcccatttcactccctttaagtaggtggaactttttttgtggagccactgtgacaagcattgggcccagggttgttttatcacattttggcagaacctcaagcaaatccctgtcctttaaatccctcctgagacttgaaatgtttcagtcagaaagtcaagcttgtgaatgactgcgaatgagataaaaatgtggttaagatttttcgctcgatcctgagttataataactgttattctatgaaagtttctcagaagaaacagagtctccgacgcttacccggcagcctgagcttcccacagcaggagttgcagcgatgttttgcaatgaagtttctaattgcatcttcccctaaattggctggtccaaacaccatccctcttgatctagaggaaatatcagaatatcaattagatcacagccgaggaaaaggggtccaactaggattctctgagattgcgaacagtatcccatagtaacctagccacttaaaggagccaacaaagaacagagcactttggggaagtaacaatgttaggtttgcaaatttaaaattcaaatgcacttaaatctttgtacccaacccaagacctactgtgaaactcattccaacactaatctgatagaagagtgaattttcgatgtgctacattaaaacaaaatatagtgaaaccttttttaatgcatatggggtgagagaatgacattcattaccatatgctctactgaaacaccccaaaggtaaaggatagagtaactttgctacagaacgcaccttctaaaaagatgtgcactgcgcatacccaaatacttttttgaaaatgactctccccaaaccaaaagcctcactagccaccagagccagtattcctggcttttttcaaagccacttttgactctgcaaactggtttagctgggttcttcatgggaagtcaagacaactattagccaaaaggcttttagaaatagaccgcagatacccagggtacataacagaattcatcacaagtagtctcagtatctctgagacacgttttgaacattctaatataaagatcctctgcagagtctaggctcactgttcacacaagcattattgtgtagattttgaccctccacccaacacaggacagaacacaccaggagcgcctccaaagaaagtgtatgaaagctaatattttattttaatgacatgcatagtggaaacagcgcattttaaaatctgaactcaattaccgctcttaaataccacgtcttaagaaagaggcgaaaaaaaatccagccgactatcacaaagggaaacaataaactttgtttctgaggaatgcggtttctcaaaagggacatggtgtaaaaatggactttttttccatccgaggattgaaacatttatctcaatttccacttccttttggcagaagaatagtgggtctctgaagatgtgccaagctcggaatgagggctgatgtcaatttgatctcagattgcctcccgctctgtgccggggaggtggagaaaacctcttgggaagacagagtggaaagacactggggattaactttcctggtcactcaatggctctcacaaaacacagctctggtggtatttacccagtagcataagccgcctcttgttaactctgtctcaatttcattccagctggtgagacactgcttcagtcaggtgaaaccaaaggtggcaaaaaaaaaaaaaaaaaaaaaaaaaaaaaaaaaaaaaatagcaggatcactcagtatttagaccagaactctctgatctgataagtgagagatgagggtatttgttcagtctttagcatagaagactccctttggagtctctctgtgacctccctggaaaatttcacttgtttgcataccataccagctatttctgtccttccaggaaggtatgaagatacccaactcagatatatattttcaagtaatatctagaagctatttgtctctgagagcttcatgaaaatgaaatgaaataatcaaaatcactataagatgtgtatgtcagggtcatgggggctcccggagcagagagagtgaaggagttgcagggacattccatttgcatgtacacccctcagcatgctccaagctttgcagtttcggataactaagttttccaagaaaacacaactagctgttttccagatttttttttcacaaaacaggaaaagcaggtggtagcttgggtctacatacaaggaaacgctaattagtgccatctatacatagtcactaaagaacatctcatcaccatttctttcttgtcaaatgctcacaaccatcaggcagtaggctaaaacgatacggtcccaaactgccaatagatgaggtacatcagggagagctcgagacagtgggaggaggcatgagaaaggataccggactcattctacaaagccctcataacaactgttcccttccattgactctttcaccttgcagggatgttggaaccttgagcgagcctcaattttccatttgtaaactaacacacagagttgttgcatgggcaaactcagtcgctagaatctgtgtatctcagactggaatttataccagttcaccagaagattttatgaaagttcagattctggttccttaggtatagagaaatccagagaccatgcatttccagccttgtccctgatggtgatattgacccagggttcacactttgtttaatagattttacacatacaaggttcactgattagttagatacaattctaatggaactaattggttgagagaaaataaaactaaaggtctctgtgaaaactaaatacccagagttggttgtttccacagtgaaaccattccacccatttcaggagacactattctcaagttatggaaaacaaagttgatgtgataatttcagaggactgcactgaggaacttaaaaaatacaggagataatgcaggaagagacgactggaattggagggggggcatttgggagacgatgtgaaaacctagtgcagtagaaactccctgaaattttcaagattgaccctagggaagacttccagtaatgggggatatggagcctgaactggccatattctataatcaggcaagctttccagaagcaggactgggacccctaacccagccataaaaccttccacctacatacagtctgtcctgtctcaagatatgctagggtaatggtggcacagaacttgtgtgactggctaacccatgactggtccaacttgaggtccacatcccaaaagggagtccacacccgacactgcctagaaccccaggaaccagaggctagatagcctagagactcacaatgtaaccaaaaatactgggaaatatttcaatgaaatgattactaatgatattctgctatactcatagattggtggctagtccaattgtcacctgagaggcgtcaaccagcaactgctggaagcagatagacatccatagccaaatactgggcagagccaagggaaccccacataaggaggtggaggatgcaggataccctgagaacatggcccacagaatcaactaagcagggctcccaggggatcacagagactgaagcaacaatcacagaccctatatgggtctgagctaagccttatgcatatgttttatggttgtgtagatgggtgttcttgtggactcctaacagtgggagtgggggtgtctctgattctttttcctgctcttatgacccttttctaatgggttgtcttatccagacttaatatgagggtttgtgcctagttttattttaactcattatgctatgttcagttgatatccctttttaagagaaatgggggaggagtagatctggggagagggaaggtgtcaggaggcctggaaagagtggaggagggaagagaaactgcagtcagattgtaatgtatgagggaaaacagaaaaaaattacagaggccagggccctattcagtcgatgcaatagaacgccaagcatgtttttttctaattctgcaagtgactttaatagacattgaagctcactttctatagaatgcaattaaatacctaactgtcaagtaggataatataatcttagctttttaaaaagatggagtattcaggtcatattaagtgttatatgccaaggtcaaaatttaatgaacaatagacagagtacacataaactgagttcattatgtatgcaaaaaactgaaaaatgtaaagaaagatctcatataaaaaaaaacttcctaatacaagcccttgagcacacaagactgctgaagaaataatatgcttagcagaaaacacttccgctctgctaaaataaaaaataaaatagtccattatactctcaagtccaacatggactctataatcaaataaaaaccataggaattggatgctgcatgggaatcctatgggccatctgtctcttcctcagcctacccgagcctataatagctaataagcttttagtagatgaggatcttcttagggtaccttgtagatgaaccatattcacattcagtaaaaatcactcagtgaaagaatggggtagtaaaatagtgattatttgatgagaaccaggaaaagaacaagcaaaacttttacattttgttgtgtcaggaatttcaacttactgagtcctacatgttttctatgacctggcaaccaagcataagctctcagtttgactaaaaaagtaaaaataaaattgtcagcccagcataggtaatataatctcagcactaaggaaataggggctcaccagagctcaaggccaccacgagctacacaacaatgagatgtcgtcataattaaaaaagaaattctttaagaattaaaaatgtcattcgacgcatggttctcaaagtacctgcaggcctgtggcatcaacctctctggtaattcttagaaatgaggctcatttggccacacctcaaaacaactagatcagaaactctggaggcgaaacacagcaatctatttcaacaagttctcctggtgaccatgatggcagctcacacacaagcattgttgctcttcagactgatcacaacaaccactgttgtcctcaatattgatcagtcaccaatcaatcaccaccaccccctctttgtattccaccttaacagaacgcctaagagccttagtgccaaaaaatcacaagttgtccttggaattcaaaagatgggtgaatgattcatccctctatattacttggttccaaattaagttacacactccaatgatacctcatatttaagcactgtggctttgagtcctcatcacatggctgttatagaaagaacagcactttgtgttctctgctcttacctgctttgcctgtgaagagactgcctgggctcaaaccaccattccacagtaaagacaacaaaggaagtggcttctgctacagcatcattttttactccaagctaaacttacacattttcccccttacatttagaccaatagaaaaacgaaagagtcaaatatgcaatggaagctggaaattgcactgtcccttataatgtctgctcatgcttactaacccagctctagaattaaacttatttcattctcacttttttactcatttcctaatttgaagtggcttagaaaatcttgttttaagtataagaatcttcatttaagtctaaaaatattgtttcatatctatgtgcaataactgttggaaaacttctctgggatctactacacatatatgtttaaaattccttcaagaaagtaaaacagtcctcagctcacaatgtcctggccatttccactgtcttattttgattttgaaaaagtgctgggggtcgatggttaacagcactgggtgcttttccagaggactcaaggtttaattcttagcactcacatggcaactcacaaccatctataactccagctccaggggatctgatgccctcccctggcctctttgggaaccaggcactcacatgaagcataaaaatacatgtgggcataaacatatatatataatataataataaatcaattcttaagttataaaaagccattaaactttatataatctatgcaaataacaaagcactacatgatacacattaatatatacaattcttatattttctgcagcaattaaaagtaaggttaaaaacatgaacaaacggaatgcaatcttctaagttatatagcaggtaagtcaactcactgtttgtcttcaggttttataacagatgggtctgtcaaattttctccaacacctcaaaagaagaaacaaaattcattaagcaaatggggatttgttttctaagaaatgcagaaaaataataaccaaattctgcttccttattttgaaggttacattcaagccagatgtggtgactcactcccgtaaccccaactaaggtgggagaattgccactagttcaaggccagtctgagatatatagtaaattctaggccagcctgatctacagtgtgagaccctatgtcattcgctccatagtaggtaagcttaaaaaaaaaacagcataattaaatgtgctatggaaattgtttaggaaagttgggaaaattattgaatccagtatctccaacaacagccccctctgaattaatgaacatctggccacaaattagtgttttaatggtgttataagacttgatgatagtattatctgtcaatagatctctgtatctgccattcatttaccagttgtatgcattaagacatccaattttattttctctaattctcatgaaagggaaatattatcctcatatcctcaatttacatcttatcctcatttacatcaatgagtacattgatgttcaaagggattgaggaacttgccaaagatggtgtatcccttaagtggccataacaggattaaagctggggcaatgcttgtgttcctcccactagttcatggtctccttagatggcctccatcagtgctcagcaagggcaaggccctgggaggttttgcagatacagcctctgtgcatcaaagagacacatcaaatgctctatctatatacagcacttataaacagtagaataaaaaggcaccaaattcttgatctgagagctggctccacctgtgtgttcagttgaggaaactctttgaggtggatgcttacgctctgttcattttgggggatgtatcttcaataaaatttagttttgaaagaaaagagcaaagcctccaaagacaacagaggtgcagtttaaggttgaacttaatcagaactgggtttgacacccaacctctgtgatgacgtgcaggcagtgaggtggctagttcccccacagtgacaacagttcagggatgccagttagacagtgatgagccacctaggcacacccaacaacttctgagattgtttcctgaccggggcttttgttctctgcttgcaaaatgctaactttgtagggtgattactcaaaagttatatggattttagaatattactctgttttgctaattgctggaaaaagtgcatgtgttgttgaagtggaaggggcaaatttcaagggaccccaccccacctctagataaagaactacagaaaactagggactgctgagagagagggagagagagagagtattggacttctccagggaagagcccccacatcagttaactaataccaattggttcaccatttgcaggaggggactgtttcatgactctgtcaacctggtgaatgaagctaagaggccctttctaaaaacattttagaatgtatgatttaaatatataacaaaggaaatctatgatcctgaaagggatatatcaaagcattttagctgctgcattacaatacaaatatgcgcttctttattagtacattcaacaaccagcactaccctggatcttttttccacgatcatatttaacaatcgataattgcaaacagtattttgaaatctgcctgcgtcacaaggtgctgtgttaatatctgcagttcctcttgctgatagtcatggtgatgatgtcactgtaggttgtggtctggctaataatggaagatagtgcaatccagttatgggctagtggcaataaagtttctcatcaaagtttacaaactctctgagtgtaccttttaacagcccctagcctggcaagttttcacattgattttgaataggaaaagaaaatgttggactgaaacacaaacacaagttaaatgtacaaagcataccacactgagccctcatattttcaaagccacaggaaggagctctttgcacttttcttgtcatctagacaaggaggggcatctgagggagcccctgcttctctacaaccatggagtgaacaaacagaataacaggcagaagtgtatcccccagcaccatgggtagacagattgatagttcagtctttaccattttaattaaacaggactgaactttaagcctggagtttacagcaatgactcaagtgttaggcccatgtctatataaacttaacttgaatacacattttgaggtgttctaatggaagaagggctttacagcctgtgaagagagagagaaggccccaaaggccaaccattcaatgccatccacatcccttagccaggctaagacaccaggctcttctagccacacaagaacacccaacccagtccatttggtctcagactctcctgatatttggaaaatagagaacaagtaagcatatttgatatataaacaccctgatgatctctctttactgatgtcattatgagcaaacacccatacccagagaatgtccatggaactttatccaacttggcatccccaatgaccttctattccatccatgtaaacaggttacctctttgtagtgacatcattcatggtgatgtgggtgctaactttttgctagaaatcgcttttattgaataaaaaattgaatactgtatctccaaaagtccattgaaaaatggaattagaaaagaaaaaaaaaagctaaccatcactctaatttgaaatacaactgtctttaatttccattgctgggaattaactgttggacttaaaatgtaatgatgattattcaggccctcccttgtaagactttttaagtggaaaaagaccagaaaacttcattagagttataaatgatgggaaatagaccacacctctcctcagagttcagcttccgggaatgctatgactctttctgagttaacaagttgtaccttcttggaagaatggaagaagagaaagggaaggagaaaaacaatcaactgccctagtatttcttcatccttcctcctctcaaagcagtaacaagtggagtctgaaatggagaggagtctccctgtggtagccctggagccactcggctaaggatagtgccctcatacctgatgctcaaattctactttaaagggccattcaaggattactactgacaacagcaggaaacatttactgaggccttgatacatgtagagaacttgcattacttgagctctttaataatttaataaccaaatgacttcaagaaataatattatttttcccatttccaactgagagaggtggggtttaggtggttgttcctcagggcatacagctagttcgaagtggagactggcagaaaccatcatctttccagacactagaaatgctagtaaacaaagggcattataaaaatgaacaaaaaaaatcttaaaaatcacaattttcctttccagccttgtttagagttaactagtgacagcattataactttataattactattatagactcatgtttttccacgaattcagcccaacaattatctagctctcggataagtttcatgcatttcatgacacctattctgtggttctgtgatgtctgctcgggtcttctttgaaggtcaatgttttgacttagttgacttgcagtggcctatttcagcaattcacataattactcaggaaaagaataaagttaattccctttcccctccaagactataatcgcagcatttgttctgtttaatgtcactttggattactaagagacataaaaatccccaaacataaacatcattaaacaaaaccttattcaagtgaaatacaaagcacactgaagagtcatcattaattccttaaagttttgctttggttgtttgttgttgttgttgtttctgtttttgcttttttaaacaactccacccaaaattcaaagcaaaacaccaacagtggagcacagatgaaaacaatcaatgtcggcccaaacagaactataaaacagatgcctctggcacccccactctgggcgtggagtcatcaagtgtttgctggtataaaaagctgaattctcttggacacactaattcagtttatattccttcctgaaaattgtttttgagctttagaaatataatacagccttgagaacaccaggaatatcaaaaaggcagatgcacttagtaatatgtacaatgttttaagtgtagatggatccctgagcagatgacacagatttcaaagtgacttcacagagttctggacattgctcctaatgccctctgagtgtcagtttcagcattccccagcctcctagcttggttttgccaaggactggaaaggtaagaaaatcagaaagaaaaagaagaaagttcaggttgtttaaatataccttaagatggccatttcctctcagaatgatactcttaaagaaatctaggagtgcagggaggagaaaacgatatgtaggatgggaccacttaagtctgcttcctgcttcccctttaagagctgtgcaacccgaggcaagttatttaaaccttctggtcctaaattcccaataatatatgcctcaaggtgctgattctgggattaaataaggaaacttttatgacagcttcttggccagatcccttatttaaatccacagctccagttccatgagcccagactaaacttgggccataacacaaattctatgccctccttacagggaaagcctgctagagacatgctgaatgtgtgggattagacatccagcaggaggtagtgataatgggagatactctgatgaaaggtttccattaaataagcctgtaccacagccctcttttggagccaaggacttccctgaactgtcatatcaaggaatacatcaaagaaagcaaactaaatcataaattgtcaaggcaataacctcaaaataatgaaaaatatccagaatttaagctttcccatgtatgtagatatgtgatttaatttttctgggaaataataagacaaggcaaagtgatgacactgaaatgaatggtacaaaaatccttccccatgtagttaaacatttaagatttaaataattaacttcctgcctatctttcaccctctatctaagcaggaaacatcagagtgggtactcatgctcatcattgtgcaatgtctctgaactaaatacctgtatctctctgccaagccaggtagagcagctccacgaacccaccccagtctttgcgtgatctctagaaactttgcctcctgcatcttcaattaatcaccttgcaaatctaaaaccagcagttctccccgggtatactcatatgtccagtgagagaaagccaacatcagctcttccagggtgttggtgggggcaatttcatcgccattgttgttattgtatttccggaactctcctgtcatgtacttctcaatggttaaccattggttggctgaatggcagtagatcaagaaaacttccagaaacctgtgatggaaaaagaagtcaatggtcccctagaagacagcaagcatagcagttaccatacagagcactctgccacacatatcatctaccctttggcctttccatggaaagagggaaccccaaaactgggaggtttgttcccaagcttattcgcctcccttttctttgagaaaacttgtcaacttattttatgagtaccagatccaacttttcattctggactctataaaatttcttgtaaaatgggaaaaagggcttcattctaactcctcagcaccaacttatgattttccttgataaatgaatacaagcttatcaagacacccaagggaaaatcatgagggttcatgatcacaaacttcctaattggtttaggatgctaggtaagcaactaagctttaaatagatatgtttgggggccaaaatactgctgggtgttagcaactacacccagcatcttcctgtctcatgtgactgaaatgttggtcatccatctgtctgaatgtttttttctgctcacataagttcaggaacttaagcccgggtatgtctggaacatctaactattgttataccagtgtgtataactatggaagaaagaaccctgaaaagggtcatggagaactttcccttgggtctgatatttctcatgtctaatggcctgagaagaggttaaatggaattcttataatgaagagccacaatgccaggcttacccaccttggcgtgtagggaatggtttgtggtttgacttggttgaaggtatagatgagtttttgggcagctctttgctgttgaatttcctttaaaaaagaaaagaagaagaagaagaagaagagctgattaaagcgtgtgtgtatatatatgatatatgtatatcatatatatgtatgtatatatcaaacatgtggtgtgtgtgtgatccatataaattatccataataattgtagaaaaaagaggtaatgaattttggagaaaacttgggggagggagggcatggagagaaagaaagggatgcaagcgtaaatgcagagctcatgaaattctcaaaaaaataaataatggctcactaacatattcttacttaaagatcaaagattcttacttaaagatcaaacagttcctaactgcccaacatctaacatcatttagcttctagtactctataccccaaaaaataaatgtcctaaacaacaaaaataataaaactcctccaccaccgtcaaaaactatcaaactccctttggttgaagaaaaaccattttagataaggatgtagccagacctctatgtctttattctgtccatcttggctctgggtctttcagcttcagacttaccctaaggcaaagatgaagcacggtactctcctggaagattttataccatgtctgtacaacctccgggagaaaggacttcacaatgaaaacctgcccaggcttgataacttcatcctcagaccaggtactgatgactcgcatggctttacggaggcccccatccatttcctcttgggacagcacctgaatcatggctgctctcccatgctgggaccaagaggacatgctcttatccagagtcagaggggaactctcttcaagcttgtagatagtcacttcttctccagctgcaataagaaatgaaagccagttcattaagatagcaggtctggggtgtgattggtgccctaaagattgactctgagtcagtcagtccacttgtccctgtgatcagaggaagatgtggctagcaggagcgggagcatgggcagggcgcaaatcggcctgacttgtcctcggatgaaggtggggagagggaggaataacgaagcatctaatgacatagaagaattaagttgtacttactgtaaactaattagacaaaagtaatattaaggctgtacgaatatgacaccactgttagactttattggagacatgatttataattaaggctgacctagcaatcattacatagcccatactagctccaaatttctgatcctcctgctgtagcctcctgagtgatgagataataggcacatgctatgacacctggctcaagacaacttcatcttttttggggtttttttttttttttttttttttttgagacagggtttctctgagtagctttggagcctatcctggcactcgctctggaggccaggctggccttgaactcacagagatccacctgcctctgcctctcgagtgctgggattaaaggcgtgcaccaccaatgcccagcaagagaactttatctttagagacatttaacctagagttcatcattaccagtcccaataaaggagcaagcatttctataactgcccttcatgtaatattaactatgctgtgtactgtttgtgagctatatgtgtatctttgctttatgcatgagcaacatgatggattttgtttttggggtgtggttttgcttacatctattgctccatacagtgtaattttagctcaccaataacggcatggttttacccagtaggaatctctcagtactaatgtcaattcctgagcctctactgttttcttttgtgcccattaacaagttatggaaagcctctatttccttattggtaaaagggaatgataacatttgtttcagtggtttgttatacagatcacatatgttatcggggttacagcaaactaggatctcagatacagactcggccccacttcaaaggactttagacacaacacattgctcaactgctacacagctcccactctgagcttagagagcaagaagggatcattgctggactcagacttcaccgatacagtgtcatagctgtgtaagcaaagtaatgagccacacagagttcccctcaaagttgtaactcactgtgttcttatacctttacttcaaataggcctaatttgctgttatcgctgttgccactgctgctgtttgtttgtttgattattctctgtgaacattgtattaagttaccagaaaggaagccatccatcccctcaccctcgtttctaattccttatcaataatcatatctggagaatgtgtggtatattctcaaaagtttattcttgatgcccatgtgggtgccactggagagctctttggagtcctaattcctcaaggcttcagagaagagttattggtttgcaaaatgagccagagagccaagtggaagtaggcatctgcataaacaatcagaagccaacctggtctctccccattggaacagtgtggggcgaatgaagatggagggcagcgtagggacctttgttatgctgtcaactgcttgcactttatcctgctaggcagaaaaactcggatacccttagctaatgccgacttgtttctcttgactgttccagctttatataaaaaaaaaaactacatttgccatctgaagaaagagcaatccatgtacatgaaacaaaacaaacaaatacaaaacaacaaagggtttctctgcccatgcctgtcagcttgcagcatacggccgtgtagtgctttcttctgtgttcattatataaggttggcttgttcttttcttccttgtgcatgtccagcctagaatcactggatgccaggtgcagcatcacgcttgcttcccaactgctgacccctataggtcccatccccatggtctgagcgtctgaccctaaatgctgcccacagtggttaacaagaattcctactttgggaaatgaatttccttcatccaccacatggccaaaatgaaatctgtgagtcaagtgaagcaacatattttttgttgttgttgttttggaggggttttcgtttgtttgtttgtttgtttggcacattcattctgccctcgcctaacctccagaaagggaagattactcaccgaacagctggattggtgtaaacggtatggtctgagaaagcctcattaaattattcctttcaatggctacaaataaaaacagattgactactttaggtcagcaccgattaaacttagaaaaagctccacatatcaaaatactcataaattccagaatattttattccaaatatcctttattttctccattagcaaaaatattataaataatagttttaaatataaaatatgccttagacaataaggctattttagtctgggggagactttcatgtgcgattatataacatggtctaaaaaggtgctatctccttgctctcccatatagcaaattagacactgactcaaatactatgcgagtcttttttttaaatgaatttgaatctatgtttcatattctctggtttcctttttccaaagcaaacccagtgcacagtggtctgtggggacacctactgttggttttgcagagttagccttctttttcccagagagaatggaacactaattttaattagaggcaagtgatctgcattttcctgccaagagtcatagcctaacagatcagagtctgtatgagttacagtattcctcgccagagacttctctacggctggcaattagagtcaaaataacagattactgctgagctgtaggactcagtcataggagcctcgaatgaggaggctgaaattcacagaaccattattcaccacagaggaggattcaggagaggacagtctattatgggaccctaaacaaatgaccttcatatgataagactggtaattaaagccagcaaggtctttttcacactgactgctagactctgtaaaagccttgtccttgagttagttatctcacccactgtgagcagtgaccatccaggaaccacaccagggcacaagtccagctggtctatgttgctttgcatctcaaaagtatttgcctcttaattctccaatagccctgtggcagactgtccctcagaaagggcaaggacaatcacccccactctgaagtgctaggaggcattgctgaataacagagtcggccccttgacatgtctgtttaatggccactttgcaaggcatgtttgtggggttattctctgaggggtggcatctattcagtggttatgttcactaagggaactttcaagttcactgaggactttcaaatctgcccttttcccaatgcaaaacattaggatcagactgggaaatggctcagtgatagaacgcttgtctagcaaggctgtgggttcaagcctcagcaaagtaattaaaagggaaccgtacaaaggaagttgttccaaacattaagatatttggattttggctagcactgagcttgcaaggaagttttagacaccaagagcatcatctccttcaaaatgtgaatttaccaacacacgcgcgcgcgcgtacacacacacacacacacacaattttttaaggtgaattctcttaccccaacaatttgtttttctgagtcagtgccatggttgagatatctaattattctgttagagtgaacagttttctgaattgaagctgagggatgttcctgtttacaagtgcaggattacacacatttagctcagctgacccatctctgcacacatgcttcctacctgaataatggtggtgaggctcttgagggcttttcaacgaggctgagatctctgaaatcatagaaatgattggcactttaattacttggctgcagataaatacatgtttgtacactgccttcaaagttactattaaatggcttcatcagaatagcttctcactattcagaaaagcttgcccaatatcctttaactcattacagcgcatggtatcctgacagcttccaatcatcagtgtaatatctccaagcatatttatacagggaattgaagaaagacaggtaatattagcctccaagatgtatttcctctgaaccaattacatctctgggttacagaaggcacacagctgcccatcatgccatcccagaagcatgatcctttaagctccttgccaagacacacctacccatgcaaagacaatattgatgccaacttattagcacaccatctcacagacttaaactaatgacaaaacattaagtatatgccagacacattggagcaggtggctagtatcacagcatgggatttgctaagctaacccaggatcctgtactgggaacagctcctccaatgttaaccctcacttttctgtctattccagccctaaatcataaggctccagggaaatcctttgaaacaattttgctgttccatgaaaatcaaaattaaactggagaaacttcagtctcatggcagcaactcctttaccctactagagtcaatagccaagtgagcccaggtttatggagcgctcttgctcctactgccagataaagaagggggcaagtatcctttgaggggcaggctgaggattctggtcagcagaaaaggcttccatttcttaattccgtcagtaatgtagactttaagctcccactatgggtcacactaggcatgagaagtgaacaggaccaggggttctcccttcagaaaagtgaatgcagtgtagtagagaaaaacatgtcactgtaatcacaaccatttgctaattgatataaaactatggaataccaaggtttatggatttccctaatgccacctggaagatggaatatcatgctcatccgatagcggcaaaggtgagtttcaatctagacttcaacatctaaagatgttgaaataatttagaaattatttaatgagaaattatttaatgagaaaatatttaattaaatattatttaattattaaattatataatttaataaattataaatgaaataatttagaaaacactgttttaaaacttttaattttgaaaacaatgaaaacattcaagacattagtggtatttatttaacacatattaactgagtgctgatggactacatgcccgacagcacagtactctatgtcagagaaagagcaagaacacacaagagcagctggctatgtgaccaggccctgtggcagacactcagggcacagcatccaggaaaccatataagagaaagcatgtgattgactcctagtgtctgtaaaacatgatattatcaattgttgcagagtcaaaatgagtccagtgtctctgctcttattcagagaaacaacaggaaaattacagtcaaaccaggttattcaaagaatctcaagctggggacatagcccagcaggtaaagtgcttgcctagagtacacaacgccctgggtcgaatcctcagtatcacaaaaataaaacaaacaaaaatgaaaaagcacatatcagtcctgatttatctgggatatctctatttttctactgaattttctactttgtatgtatatctcaaaaacaacaacaacaaaaattacaaagtcgagaacaacaaaagttgtaataggacaatgaactccatcatcaataagataaaaaattaaaaataaatgtttaaatataaaaacttactgtcagcttcacttgagcttcttgttctgtttgtgaagaaaaatgaaataatttagaaaacactgttttaaaacttttaattttaaaaacaatgaaaaattatacgaagtagcaatagagtacatatatatatgcatatatactttttactatattttatatgatatatatatatcacatatgtatatgaaaggcttttctctgtcttatcctattttaccaatagagaagtctgtaaccatataattattttcacagaaaaattaatgccagtagggcatgtaaatcacttattatctatgccccaagctaattgagaaatggtggtgttagtggttttaattagctgtgtgatcacacaacatatataagatttaactgtgtttgtgttgttcgggatcaattaaactaaagggtgcctgaactatgcaaagcagatgcctacaaatgagtctgagaatgtctctggacaagcccacaaatcagtttcattagcccacgtggcccctaaatgttcacaggctgaaattagctctccttaaattgttacttgccctgctcaagtgcacaagtggccacgggcaagtctgactaaatgcattcaaagaatatctccagtatttaaggaccttggggaagaaaggacaattacaattattgtttaatttcatgctgcaataacccaccactctgcatgagcacaaactactgaacctttgggagaagaaagtcatgtgtcctttaaatctagaaacgggctaccatggggctgtggtggcagttcccaagaaaggccttgtcaacagagctgaggaccgcaactgaaagtcatcatctacattctttatttctacctgccttcacagggggtgattttctctacccccatgattttgtagatgatttgatggtgtaactagaaaagtaagcacagacacacacacacacacacacacacacacacacacacacacacacacaccatacaggtaaagtggaagcatcaccagaacagtgctaagtacctgcagcactagctacttggatattgacacaggaggatcccttgagcccagacgttcagggccagcctgagcaccataatgagaccatgtctcttgaaacaattaaaataaaatggaagcatctttacttgggttgggtttcaaatttcatttctccaaataaacaagattcaggaatatcctacaaccagattccctccttccctctctgcctcaatccttgtcaaagtagatgccttgacaactagaatgccactgaaaaccaggaaataaagatcaacctcattctgtaaaaggaacacactgggggggggtggcttttgaaatctagcaaacatggtctggagtgacagcttggtggctaagagcacttgttgctcttgcagaagacttatgttcaattccaagtatccatctggttgaccatagccatccataactccagatccaagggatcttttctggcctccatgaacactgcacacacatgtatgcataaacatatgcagggaaaacacataaaataaaaataaatacatcacttctaaatacagagaataaattcaatcaggcctttggggttttttttaaagataaaatacatttattttacactgtaaaccacattcacaatcttactatctgtgtaaagatagaatggtcaatccatgtatgggtttttgatactaaaaaggaattgttcattggctgtcaaagtgtatgttttaccaaaatactctttaagggacttgggtgaggaactattaccagaaactggaaaacttgaagaatatatttttccattcttgttaacataaaaataataataatgttacctcatatgcattttttcttactattttgaccaaactaaacttttattggaggacagaacccagaagctcttgatgagagccacacagaaatactcacaggaagttcctgttgagattgctgctcctgggactccacgaagggttttcatctgggtcctgagcagatggaaacagacattaggagcacatacatcccatcccttcaatgactcatcagcaaagcacactctttgctcctctgacaggctcagtgcctctcttcaaaccaacaacggaaacacaagctataaagatgcataatgtcaacatgtaaccaggatagctccataggtgatggttttaaccaaatgaaattatttttatggagacattgaaaggaaaatgcaacttttatacgaacagagattaatcagctaatggtctgaaagaaggaatggaggtccaacttgacagatacaatagatcatttttatcgttaatatattaagaaacacatagggcaataatgagtatggtagtttgaatgtaattggtccccataatctcatagggaatggcactactaggtgatgtggagttgttggagtgagtatggccttgttggaggaaatgtgtcactgtgggggcactttgaggttccctatgctcggaatactgcccagtgagtcagctgacttcctgctgccttctggtcaggatgtagcaagctcagctccagcaccacattttgcatgccaccacgttccccatcttgatgctgatggtctgaacttttgacactgtaatccagacaccccaattaaatgttttctttatataagagttgccatggacatgatgtctcttcacagcaatagaaacctaactaagtcagaagttggtaccagaagtgaggtattgatatgataggctttgaccatgtgcttgtctgaaggaatttgtactttggtactttgggtttggaaagcagtggaatgctttaagcatgcctaatgggccatactagtaggaacatggaagacggtggtgctaagcgttatttgaactattggggggggttgctgactcaagaggtttcagggaagaaaaatttcagtatgtagcctagagattgttcttgtgatactttggtgaagaaggtgtctgtcttttgcccttgtctgaagtgtctgcctaaggctaaaatgaagaattttgggttaataccagtggcagaggaaatttcaaaacgacctcatatagactctgtcatgtgatttttagtggtaagtctaatgaagatttacaacgaaaaggagcaagctgagctgggtaaattacaaaatgaaaattttgaggagaaaatgagcaccagttatgtgttcaaggagataaagtgaccaaaaaatgcaataaagggagtggtaaccaaagggcaagatcccacccagctaaatttccaatttgtgaaaaggaaataaagaaaagtttagagctgggtgtggtggggcatgcctttaatcccagcactgggaaggcagaggctggcagatctctgagtttgacagcaggctggtctacagagcaagtttcagaacagccaagcttaggcagtgaaaggcagaaagctggtgtgaatgtagttagatgaggggaccatgttccagccccagcaagcaacagaacttggcagcttcagccacatgattctgggtttagagttaagggtagaagaaaggaatcatggaagaaagctgctgaggccaggcatgtgtcaaggatgtcactgaatggaggcctagtagggaagccattatgtgaagctgtgaagctgaagcatggattgctttggagaacccaaaatgttagacatgcccaaattgtgggatacctgctgaggagagctgctaatagcaagtggaaccagcccaagagaaagaaatgtgctgcagtcaacaaagctgaatggagttggagatctgaagagcactttgacatcaggcacggagagacatagtttggagtttgcccacctggtttcagtcttgccttggtccagtattttcttgctatgctaccatccctacattttggagtgataataaaaatcttgtgccattacatgttggaaacatatgacctgcttttttattttgatttttacaagtgattacagttaaaagattgtatgaatctcagaagagattttgaactgtggactttaaaacattgttgagactgtggtagactatggggacttttgaaattggactaaatgcattttgcattatgatattgttataagcttatgggggccagggagtggaatgtggtagtttgaatataattggcccccataatctaatagagagtggcactattaggagatgtggctttgttggggtgtgtatggccttgttggagaatgtgtgggggcaggctttgacgttccctatgctcagaatactgcccagtgagtcagctgacttgctgatgccttctagtcaagttggagcactctcagctccagcacgtctgccctcacaccaccatgctccccatcatggtgataatggactgagcctctgaaactgtaagcaagccacccagttcaatattttctttgtaagagttgctgtggtcgggatatctcttcacagcaatagaaacctaagatgatgaggtacacctctggctgtgtctgtctgggcatttccagagaggattaactgaggtggaaaaacacattctgatggacagcagcaccttcccatagctgggctctcaaactgaattaaaaacagagagacgagaaagcctgctgagttccagaatcccctttcagctccttggtctacagacttgtgagcaagcatcctaactctctgctactcccatctcccactgtgccttccagacccatgattgactgtatgctcaaactgccagccttaactgcctttggccccatgagtttctttttgctaggaatttggtaacatcagtcattccatcatcctgtcataagtacacacctgctccaggtgatggaggggctaaaaaaagtatcacactggattttcctcattctatttcctgtttatccaagtcatacttcttgagatacagtgtgctccagacactaggcattttcccgtgaggtgtcttggttggatactaccaataatcttataaagatagcattttgcaatgatagcacatggcactcccaggctaactgatatatacagccttatcagggaagatagatttgggatttgaacacaggtcctccttacagtaatcctcaagtgagcattttcaaattcttttagatgccattgctacaagaacacctgaggatatttatacaggcagtgtttatagtgcccaagttcagttattcaaaccatgaccaaaatgagtttccttccattactctgtcacatgccacatgtaaagatggcactaaaacaaagtatgtatttgtaggtggtagaaaagcagaatgcaaaactagacatctaggtattagagaaatagagaggggcctttattctgcaatgcttgagtcccctccccatgtctgaacacattcccacagcctattttagatgaccaaacacactagaaattcactgtctccaacatcattcattctatccttgaaaagctccaattggtaaaaagtatcttctcaaatcatctgtgatctgtcttacagtaattcctccatgattatcctagacctgtctctgaaaagcatcttggagaaaacccgtttctcttaaatatgacagtgttcacatatctgaaaaagtgagtttcttctcttgtgctgggcatccccaggacaagcaaactgcacgaggagaaagagaaaagactgatgtggagaggttagaaaactaagccaggagtgacctaagcatgtagtccccaaggatttcaatccgaggtcagtaaaaacagagaccatttatgggctgtagcaataaagttagcagagacaaatgaagtgttacatgcacaaattcttaaaacactatcaaaatatttttacctcttgagcctgctttaggtagtcactgccttgtgtcatatgttgttcaatttccttcattttcattttctgatatatataaggttccaaatcttgtttttaaaagaagaagaaaaattagaaagtgggctgaaatgtgttacattcaaatcacatttctcaaatagaaaaatctggacacagtacatttatttaaacagatatagttttctctatttttagaaagtttcaccaagtttcatttttccttctttttccccttgtgattgaaaactgcatgttctatttctattcttctatagttgtattcacacttataataacttctacttctcttttttaaatgtatttactattgttgcaaagcacgcacatgtggcatttgcacaaggaggttagagaataattttgtagagtcacttctctccttccacttttgcatagatgctggggattcaactcacgtctctggatttgcacagttagcacctcacccactgagccatcacaccaaccctaacttctacttctccatcaatgtcagaagtcaaataatccaaagtagctttctataacacacattcagtagttgtttttttttgttttgtttgttttttgtttttttttcattcattatctcttgcactcgattacctgtactttaaaatatgtgtaattttagttgtaaattagtaatccttccttcataagggcaccaaacacaaaagtacaataacaacaaaagacagaaaaaaaaatgaaggctatctaagaagcttaatttttatgcttttcttagaatgcataatagatgttgtttcattatgtttacacctggtacctacagaactaagagttgtaacaaatgtaagtgacaataattaagttttctatgtgattttgtgccataaaaatgtatacaagaagtacaaaaaaattactggcatatgataaaattataatgaatatagcttcaatgacatagcagtatttacaaaatatgtaagagtttttggttttctttgcttgcttattggcttgcttttgtttttatgaaacaatgaagttctcattattcacccagactggcctggcagacacaaccttcttgcgtcagccgccttcatgcttgagtttgatatgtggaaaggtacaatttccaattaagtgtgagttaaggcaagataactaaactcctgagccatgcttataaagcaacatcattcccattgaatttctaatatttcttctaactttgtgttcacttgattcacactggcttcagaaagggctctgtattttaaatagaaaacagggttcacctactttggcattgatgttttagtctggataattctttgtcctgaaacctgtatcatatgtcacaggatgcctcatagtatccctggcctcttctcactagataccaagagcattcctctttattgtgacaacaaagcgtgtctacagactttgcccagtgtcccctggggagggcaaggggttggggttaatgtgaaaaaccaacccttagttgaggaccatggggccatctgagtgaggaaggtttataaagaagtacaggaccctgcagtaaccagtaactaccagtattttaaattcagtgtcttaagaaatttcaaatgtggtgtgtgtgtgtgtgtgtgtgtgtgtcctgatcacatgatttcttcttttttaaaaagaaattctagtgcccaaagttcaaagctgcatttgtgtgtgtttctgctgacaatctgtctcatctcaccctgtctctcatatgagctcatcctcacatatttcattaagtgggtccacatataaataccccatgtgggccacaataaataagctttaaaggttctgaaaattaagcaaactcccctccctgtaagtcagactgaaggaccccaatttaggggaagcactctttgaatataaaagattacctaaattttaatattttatttctgtatcctgatagcaattcctttaagcaaataaaattttgtctatactagaagcattactaagtagcaaagaactgttcctcttagaggcttctgccatctccttacctcatctctaaacgtaagttcaaagaccaccactggtctaaacaccacatgctagaccaatggctctcaatcttcctaatgctgtgacactttaatacaattccttatattgtggtgactcccaaccataaaattatttttgttgctacttcataactgtaattttgctacttttgtgaatcataatgtgaatacctgatatgcaggatagctgatatgtgacccctatgaaagggttgttcaaaaggtcgggacccatgggttgagaactactaccctagctgacctacaggcttctgccagatgttggggtccagggctacaaaagcacatacttatctgactgaagttggatacagagagccagttcttgttgtacttttcagtgatgtttgtttctcctgactctgaattcaattggtcattttgatagcaggcattgactgttatcacctggagagaaagtcacttgtaggaacaccatgacattaatctaacaatattttgcattatgataatcgaagcacacagtggaagacagtgattagccttggccacagtttgaattacctggaactcttacaaaccccatcagtcaggctaacaggatacacacatctgtgtgcattctctttgtggtcatgattaagaaccagcatatggtgtgggacctgaataagcatcagaatcacttagggctcaggaccagtcactgccttgcaccctcaggatttctattcaaaatgtccaggggaaagatgagattcagatatctaaggtggtcccaggggaagctcatgatgctgatttgagatcatatttcaaaaactactaatataaagaagggaaacaatttcagttgaaagtacttgcattgcaattctgccccatcagaacatgtgcgaacttagaaaatagtttactattcccattcttcattgtctccaaagtataccatgacagtcttacctctttcccagggagagacacaggcaaattggtaaattacaaagccatacataaatgaaaatttgagtacttgagctcaggtggaattcctagttgaactgagaccatttgaaatattctaaaataaatctcctaaaatgtttatcccatggtattccaacaggcattttctgagatagtagccttccttatcaagctaactgtctcccctaatggatgattttacataattgtctctatcatgtctctttgcttctgcttcttttctaacttaatttggagtcatgtttccatatgaatactatatttacatcatttccaacttccaactcctctcatgcctccacctcctctcaaactcatgacttctttaattattgttacatatatatgcatacatatacacatatttatacatacaacatgctgagtccacgtagtgttgcttgtgtatatatctgttaagggttgaccagttgaattatgtattgagggcttgtccctagagaatactgattgtccctctccccagagtcattatttgcctgaacctctccatctaggtgtcagtcctagtaagatatgctccatccacactggcctaacaactgatgtcattgtgtaggtcttgtttagacaacaatatttttgagatttcatgaatgcaatatatagaggacactatctcacagaagacatcttggtcctctggttcttacaacctttctgccccctcttccaaaatattccctgaaccttacgtgttggggttgtgttgttgatgatatctatagtctggggctgggcaacccatggttagttgttctctgcattttttccagttatgggtttctataatggtttcagtctacttcagaaaacacagagagagagagagagagagagagagagagagagagagagagagaaaggaaaaaacttctttgctgaggaatgagaaataatgtatttcaagttctaaaagattgaagatgtcagcatagaactatctgcgccagcaaaactatctgccatagttggagaaagaaaaactttccaagataaaaaacatagtaaaaggattcatggccaccaaaccagccctatgaagatacctggaagccatactccaggctgaagacaggaataggcatccaagagagaacagaaaaagaacaaggtaaaatttctaaaacacaaaataaggctaacaacacaaatagcaaaatagcaacaataacaataaaattacatcaattaacctttcaataataaatataaatatcagtggcttcaactcccattcacctatagttagtagaatggattaaaaaacaaaatccatctttctgttttctacaaggaacacagtttaccttcaaaataggtaccatcttaaagttgaaagatgaagatgaaaagaagtattatacagggaagtgatggtgcatgcctttaatcccagaactcaggaggcagaaacaagtggatctctgtgagttccaggccagcctgggccacagaagttcaaggacaggctgcaaagctacacaaagaaaccctgtctcaaaaaaagaaaaaagaaaaaagaaagaagtattccaagcaaatgagatcaggaagaaagcagctgttactatcctactatctaaaaaaatcaaaatcaaactaaaactaatcagaagagaaattgtagtcaagcgatcaattaactaataagatattgtgatcttaaacaaacatgccataaacactggtgagctcaatttcataaaaagcatagtactggatgtaaaaatgcaaataaactctagctcaattatagtgggtaatttcagtaccctactttatttagtgattaggtcatttggaaaataaaataaaataaagggagaaacatcagagttaaacgacaatgaacatcaaatagacttaacagatatttatagaatattctacccaaagaccaaagaatatacactctactcagcatcccatggaatcatctctaaaatagaccacatgagatacaaaacaaatcgaaacaaattaagaaaattgaaataactctattcattctttctgaccaccaatgcaataaagattaaaatcaacaccaaatgaatccccagtaattacacaaactcatgaagattaaacaacacattagtgaatgatgaatgggtccaagaagaaatgaaaaagaaattaaaagattcctggtactaaatgaaaatgaaaacaaaacacaagaaaaacatctgggacacagtaaaagctgtcctaacaggaaaatttatagctctaagcacttacattaggaaaattttaaacacacaaataaatgacttagtgacacaacctaagaatttggaaagagaaagaacaaactaaacacagtggatgggaagaaataataaaaatcagagcaaaaattaatgaaaaagaaacaaataaaataatacaaagaatccatgaatctaagagctggttctttgagaaagtaaacaggatagacaggctcctgacccaactaaccaaaaggaggagaggacccaaattaacagaagcgaaaatgatggggaaatattacaacagacacaaagaaattcagaacattataaaagaatactctattaagtaaaaaatagaaacacagacaaatttctagattcatgcaaaccacttaaaccagcaacttaaacagacccataacaaataaagatattaaaacagtaataaaaagccttcaactgcttcttactattgtaataaagagagctgagtgttttttcagtttattcagaaaaagagatctgtgtaaatgaaaacgaaaataaaacacatgaagaccatgaaatgtgaattcttgcaaaattaggtaagagtcattctgacaatatatttaaaagattcactggactaacatgaaaacgccagagtttgtattcatgaatgcctgcattcaaaaacaaatgataaaatatttacatgtatgaaattgtcagtgaataaatgaaaatattctttctaaatactgggaattcccaaatcattagccaagttttttaacttaaactagaaagagaaaatcaagtcaaatccaaagtaaattgaacaaaggaaacagaattgaattccaggaaaaaaaaatcaataaaattgagttgttttgttttgttttttcaaaaaaaaaaaacttaacaaaacagattaaaaaaaaaacctatattcaggctggtcataaaacaaagaaagatagtataaatttcaaatttcagaatgaaagagacagtgtcacagagactattagaatgaggcaggtggcacacacctgtcatcgctcagggacactgagtcacatgacaggagcatgagtttctagccagccaggactaaatagtgattccctgtctcacgacagagctggaggagggggcaggagaagggggctatcatatacaacactacgccaaataataagatccacagacccttggcccaactaaccaaaagaaaggaaaaagatgacccagattaccaggagcagagatgaacaggaaacataaacaaaaatgggtaaagtctttaaatgcagaaatgatcaaagccaacttaagaatctgacaatctaaatagccctgtgactataacagacacttaatatgtagttaaaaactttcccacacggatggttttattggataattcaactgaatatgtaaagttgaaagattaacaactttttacaaactcacacagaaaactgaagacatatacccaatgtagccaatgatcatgggataattctgatatccaaaccaaagctatgacaataaaggaactaaagacaatgccccaggaacacagatgcaaaagactaacaaaataaatatcaaatgtaaacatgcataggtgggcaagtggcatttatcccagtaatgctggtttaatgtccaaaatattaactctgatattataaaatcaattagcagggtaaagaagaaaaccatctaaactggtgtgcaacaatattggcaaatatcatatttattgatgaaagacaaagtatttccaccaggagcaacaaaagtaaaaacaaaggccgtgggttctgcctctattatagttcaagagacaaaaatgggaagatgcctgctttcatctcctttatttaacacagtactaagtgttccagtcagtgtaatcaggcaaaaaaaaagctaataaaatatatccagttcaaaaatgaggaattgaaactataccatcaatatcatcactaaccaaaaacattaccaaaaagctttcgaaagcaaaatgagtttggcaaaattatgaaatataagatcaagactttacacacatacacacatgtacaaacatgcacacagagggagattaaagtaactacaattacaataaattttaaaactttgatatgtgttttcaatacttaactacccatgtaatgagaaacactcaagatcggaatgctaaaaaacacaaagaatttccaagaaagggttaaaaaaagacctactagctagacatacatcacttccaatggatcagacacctagttgtggataagatgtcaattttcccacaactggcatgcagattcagagcagttctattccaaatcccagaaggctttggtgtaaaagctgaaatctgagactaaatttatatataaatgcaaagaacataaaatagccaaatcatttcttgaaaaacgaaggatttcttttatgtatgatttcacaacttataaagtttcggcagttgagatagatttagtattggcatggagatagacagaagtagagccacacacacactgtgggtctatatagtcaattagcttttgacaactgttaaggtaattcaatagaaaaaaaaaaagtcactcttttaccaaaaaaattatagaatttttcgatattcatgtgagagaaaaaaatccaatccttttgtatccccatatacaaaatttaccttaaaatgggctctagagccaatgtagaaactaaaagtatagaaatcctatcagaaaacaagtcttagtgataccttgggtttggggaatggggagaagcaaacctttcgctacaaaaggaaaagtcaaatatttgatcaacattctaaagctaaatgtacttgggacactagtgatgacttggaaggggtaacttgccagtgggaaagggggtttacggaaacacccaaccaaagactagaacacacagccagagtttacaatttcataggaagcaaacaaatcaaatttctgcattctgtaaaagacccagacaggtgagtccagatacacgcatggaaggtctcccaagagcttgaggagacactcactaccctcactgcggtgcacactacagggccaccagtgtgcccaagacaagactgagcacatgcagacagacgtgaaagcaggaaagtgataaactcacaagccataggtgggcacagaaagccatgtgctgatttacacaccacgggatgctggcattcctcaccctttcccaagcacttgccaaagagaaattaaaacaaatgttcgtggaaggacttgtacacaagtgctcactcaggatctcttgtactagcccaaacaggaaacaatgtgaagggctttcagcttgtgaacaggtaaacaagtcaaaatgtgtgccttcactcctggtacaatgttactatgtgtccaaggggatccaaggggagatgccactgactcagttgctcaaaccctaaagtacaatgggaagagtacttactggcacctggaagccctgggtcttccgctttttctttgacaggttcctgttctttgttaggagttttgctttgatccatgttgatccagtctccgaggatcttgaatggcctggaagggaaatggcgagcatatgaatgctgaaggcagtatatggagacagttttgcattaaagtgggggctgggataacaagaagaatgttattagataatcacagacatcttcagaagagtagcaatgcaaatgaccacactttttaaaatgtttgcccctcacccagccataaacagatgtttctatcacatctcacccctcaagattcaggaatcatgcaggaaaaaagggggaggtggaaaggaggactgcaatagacagagatgataggtgactccaaggaaacagcactttccagacaaagcagggttaatgcacatatgaacccacagggtctgtgatagcatgcacaagaattgcacaagttcatgagagagaaaaaaatgccaataagaaggggaagtggacactaagtttcacccctaaccaaggagctattgcaactgattgctactgagagttggggaagaatctcttttccccattggagtgagactagctaacaaccaaaccccaggcagggcgagtccccccatcaggaacaattggccaccacaaacaactcctgttttgtttcaggtttggtttggatctgggttttttttgttgttgttgttttgttgtttttttgttttttgttttgtttttagagagagagaatatgaaattgtgggggtagggggagatctgggaggagttgggagatgaaagagaatatgaccaaaatatgttgcatgaaaagttttaaaaataagaaatcatgggtggagaaaaatatatatacgcaaatttaaagcatttgttccttaccattgttcttccagatcttcctcagtttctcctccttgtggaatctaaagctatgactcctaacgagaggtctgtctttgcagagaggattgatccaaaaagatcttcttggctgggtccatgatcctgccagcactgagcgttcactactacacggggccagtcttcttgagttatccagtctggacctgcttccaatccgcagcgggcatcctctacctggaatggagtcactgttgcaagtggagggcaaacaggttttccacttttttttaaaactaaacacatcagtttcatcactttccgaaaaggcccagttcacatagccaccatcagcttgcatgctgatggctccagaagggagagaggtcattgacacgggagcaggtatgccactaatcgtgagtggatcttctgccttgtcatgtttgtctgacatctgtgtgactgcctcatgttgttcctggtgttctgctaccaatgcctggtgggaggcagcaggggttggcacaggcaggtggatggtgatatcatgttggcatacatgttccagtgccaggccatctatatcaggctcctcagatgatctgaaaagaggtggaggtttttcaaaagagaaaggaggttgcatttcagaagatggtaccaggagaaactgaccatacttcgagcatgcttgcctgacatgagacatcccagaagcaactgtccttgattccatttcttgttcctcctggtcttctcttacatgtgaggcctctctcttaccgtgtgtaatctctaagagggcacctgtctgcactcttgggggaagctggctcctagcaagactccgcagcaaagaagggggcatgctataatactgaactttctgctttccacagctctccatgctgcttagaacatttgcacagatgacgttggtccagctgtggggaagctttctacaagcagaatgctttctattggccagaagaacctcatcttcttgcaatgtgtcaacagctgaaaggacctttaaggtgtccacagtcagggcggagagatcttggaggtgtcccacctgactgtctaaggatagcagggaatcctttatgaaagacactttttcattcatttctttcagttggaagaacatctctgaaaccctaatggtgcagaaaggaagaaaaccaataaccatgttagtctgttggaattgtttctgctgtcttagtttgtcttttccatccataaatgaaagctaaattttatcttcttcccaaagctaagcctgcctcctatgttcttctctctcaaacacagtatacattctaatcccagatgatcttgatttccccagtcttcccactacaactccagggaggaatactgaaaatctatattcccagccttcgtatctttctaacatctcaggaccaactttccagctgcctgcaggtcaccactgccgattatctgatggatcagcccattgttattcacaaatgtattctcttttgcatgaccaacattggaaaatcttctattggacaatcctagtgggagaagatcctgagacaaaaccaaaatgattgcgacagaaaactcctccaaaataatgtgacagacttttatgatccccatggaaggcctcactctccctggggagtgggaggggggtcgtaggggacatgggagggagagggaactgggattgatatgtagaataagattgtttctaatttaaatatttttaaaaattaggaaaaaaaagaaaacacctccaaccccatagttcaaatatacttctcacactccaaataaagtccattttaggagatctatattcataaaagacatacggcaaatatttttaattattttaaatacatgaactcaaattatgatagttagtcactgatttatgtaaaaacatggcacattcttcagtagactcatttgagagtaaactgcaaataaattgaactgagataacatttcccttcacagaaagggaagagaagaataaaatcttatttgctaaatgattatctgtacatatcactgtaaacatctccagtggggatgttttgtttcaaaaaaaaaaaaaaaaaaacatatgttgacatcttaacccaagacccttatttggttctttacgcaagtaatcaagttaaaattatgtcatttgctaaaccttagttgaagacaagcagcataaatttgaaaagtccttttgagtccatatactgttatgtgtgtacatgctttcagaggctgaccattcagtcttgtgtgctcttccctggggaagactctttctcctgctgtcagccttccttagttgcctgtagctctttatctcaggttgaggcctcctgggctttccctttccatattaccatgtctattaaagaaaaagagggcacaagtttgaaagagaggatggggcaaggtacatgagaggaggtggagggaggaaaaggaatggggaaattatgtaattgcattatctcaaaaccaacatatatagattagatatatccccaaaaggttcaaaaaggaagaagaaaatggaaaatctcagcacagacaaacacagaaagaagaagatgtgaagacatgttaagagaagatggcattggctccagaactgtgcaagaaagaatcaagaactactaccactcacaagcaaccagaagctagtagggcaaggaaggactctttcctagggacataagagagtgtgtggtcctgtgacatcttgattttgaacacctagcttccagacacatgacacagtcaattgtttgctgatatgaaacgctgagtctgggctactctccctacagtaatgctaagaaagtaatgcagttacctaagcatagagagatgtggtgattaattttaatcatctgcttgatgtgtaattcagaaatacctgcacagagagtttcactgagggattatctagatcaggttgtcctgtggacacatctgttggggataatcttgattatgttattagaggtgggaagagtcacccagtatagagggcatctttccctactcagggatcctggagtaagagtggagagagcaaactaagcaccagcctgcatgcacttagtctctgctctctgctctcgactatggatatgactacttcaaggtccttctgccctgccatcacttgactgcccgatagaatagtgaaccaaatcatcccattcttccttaaattgctcttgtctagaacaacagcaagaaaagaaattacaaaaggcatcaggtttcattacttaacataaaagcataatacaaaacttcagaaacaaaaacatatcgactcttgggctggaaagatgacttagcaattaagagcactggctgctgttctagaggacctggattcaattcccagcactcacatggcagctcacagtcgttaactccaattccaggggatctgacaccctcacatgcaagcaaaataccaatgcacacaaaataaaaacaagtaaatcatttaaaaaatattgtctctcctctcttatgatggctaaagttatgttttaagtttaaattactgtgcttaagagatctataaaacaaaaatgcctataacctgcaagttttgcccaaagacagataacttccttgaatgctggtggggactatggttcacataagataacaagccagatgttttcacttctgtaaacaagcttggttgccccaactgttcaggatgtgcttgcttacatgcttacatgtaggcagaagttatataggcacaaagtacaccaggatgtatgcttgtccttgattggatggtgggtaatatgtagcctagtgggttttgcttttataagcctctgactaatgtaattctgtgtcatactctgggaatctctggtatgaactttgccagtgtccattgttctggccagtatttaataaatacttcaaatttggctcaaaaattgtggtagtagtcttattctcacctggtgggattaacatcttccggatgcccccagggagattagaccacccacccaaattccaaagttggacttcttcactccaggattgcaaggttgaagggcggcctcgtgaggggcattgaagcattccatggctctgaggcatgcttttggtttcacagactgtcagagtgaactgctgtgctgagaaaagcaagcatctaaagaggccttccctgctaagtcataaattttctatgacatctggttctgttgggatcccaatcaggaatgtagaagacttcaagaaaaaccaataccctgctatccagggcaaaaggcaagacatcataccatctgcctagttctaattgtttggatactgggagccaaaatggaaatcagtcagatgcagttaaatgtagttttgtctaccagttttgtgtatgtggatggtttctagtgtgtctttaagttttgttgcaaatgtaggaacccagacagaaatgggtcaggctcagttgaatgtgtgagtgatggttgcaccacatgttttgtttctgaatggtctcctttgagtgcataggctttctctgttctgtgtttattggttttgtttctgttgtttctgccactgctgctggccaccagctaccactaccacacttgccatggttgctttgatggctagtttcagaatgtcttatctctgagcttttgttccctggatttggtctagcatgtgccaccgcacccaatgaaatcaagtatacttaatagatggcactcaaatcttttcagagatctcctgaatatggcaacttaaatatttgatggaaaaagcttcctgagatagacaaatataccagatcctagaagcaaccctaagttctccaatgaaaaccaaaacaaactgtgcatagacccggattgtggtgacgttaaccactagggaaaacttcctcgtgcctcaccagctgccagtgccctgcacaaactgtgaacactgttggattgactgtcctacctaagtcaaggtaggacaatttttccaagttcctcatccacaggaaattctctcagaccttctgagtctggcaggcaaaggcctgtgctatcctgtgcagcggctgaagatgtaatgctgtcctgtgtaacagccaaagatctacaatctctgcccagcaatgaagtcatggagaccataggagcctcccaggtagctggtgcatctccgtcattttagtcactgcaaaggccatttggtttatacttcctgctataatttatccttctcagatcttcgatggtgttgatggctaacagtagctttgtcagtctggcagcagcagacaaccagctccttccccaagactgcaagctaccttcttagttcatttcatatgtaacactcaagccttcatttttctagagctcctagatctcctgctgagaaaggcagacaggtttgccttgctaataggtttcatattcaaagaataaaaaggtttcaggtataactttttactattccttatttttaataaaaagaaaaaacttgtttggcaatgactgctctcagtaactaaccatttgtgccttgtggtaaatgattagttggaaataaaaagggtttaagatgtgtaaatgcaagttataaaagtctaaggacgttatttaaggtatgtgaaaaatgaaaaatgtttcagatttctttccctctatgctattgttaggcaaaggtttcaaaggttcaaagttttaacgttgatcaatggagttatgataagatggtaaagtactgactacatcataatcacaagctcaagaatttaaatttcccgtggttgtcttctaagtacagacttaaaggtccttctcatggggttgaaaacatctctgtccagcctatacatccagccctctggaaagagaaaatgatactcatggtttttagttcaaagccatagcttttgctgtgactcaaagggatgaggctactccagctgttttacagacacctgttaaaatgttgcaacgcagatttcagtgcagattacaaataatgacaatgttaatatatctaaaacttttatctctgttgtaaacaaaaaaaaagggagtcataagacttggatccatgactcacaaagtcttagggctcctcccctcccccgactgccaggaccgtgaaactggaagttccaaatataagattccctttaagtttcttaactttaacttctaccctcaatctatatctgtcccagcagatttccacttggctaagagacatcatccaggaattagctgagaactacaaactgctccaaaagtgatctacaataaggaaaaccctggacttgctaaaagctgatgtgaaccagtccaaccaatgtgattgttccctgtgtcttaagctggtcagttaaccatatgcttccgatgaagaccccctttgctctaatcccctcttggcctttgactggcattccagcctttctggaccctgacaacaatgtgctaatttcaacaggaagtagttacagaagaaagtacatcacccactatcctcaaacaaaggctggaatattaggttcaaaggaaacttcctgcaaagggggacaaaatggctacctattgtgcctgttgtcatcccaggagtcatgctggcctccaggctcattatcaaaaaggtaccttttaaaactaaatagatccagatccatcaatagattcattagctgaaatagttcttcaatgtgattgggcattcaacctgttctgtgaagaacaggttgtatggctttaaggaaagaaaaaactgtttctatgaaaaccacttaggaatcattagagataatctgactgtactcaaaaaataaacaaaaaaaaaaacaaaaacaaaacaaaaaccaacaacaaaggacaaaagacatgattggctcccattctcactttcaggctcctcctagatagtaatactgatgccagcttaacagatcatcctagtaggagcttggaagatggtagtgctaaaagcaatgtaagctatggaggtccagctcaggaagtttcagaaggtagcaacattagcaacttaagttttgcaaagaatggggctgtcttttgtccttgtcttaaaaatctgctggaggctaaattgaagttttgtataaattttcttggcagatgtatcaagaaaacctaaaatttattgtttggttattagtaagccacttttatgagggctttcaaagggcaaatggggcaaaaagaaaaaatacaaaatgtaaagtttgaggagaaaaaaggcatcaggaaatctagtgttggagcccaggtttgttctgagagatgacaggcttgatacagtaagaaataaagggggtgatatcctcaagaaaaaacccacccagccaagcttccaacatgtagaaaggaatgtttgtgaaacaggaaaacatcaacaaatcaaaagcttatgcaaatataatccaaggaggaagaggttccatcccaagcaggcaaaagtacttggcagcataggtcacaaagaatatatgagtaaaggggttgtagactcttcttccacaattaagtaaagctgctgaggccatcggtggtgcatgcctttattcccagcactcgggaggcagaagcaggtggatctctgtgggttcaaggccagcctggtctacagagcgagtgccaggataggctccaaatctacacagagaaaccctgtctctaaaaaacaaaaaacaaaaaaagagaaaagaatagaaaaagaaaaggaaaaagaaagaaaaataaaaaagagtgtggactttggtagcccattccacatagaggccaagacacacgggggtgggcccaggccctatcccaaaggatacaatagactttgatgacaccctgtggaaggcctcaccatccagggggagcagaaagactatgtgataggtagggttttagttgggaaggggtggtagggggggacaggagggagaagggaactgggattgtcatgtaaaacaatcttgtttctaatttaaataaaaaatctgaaaaaaaaagatagaaagaaagaaagaaagaaagaaagaaagaaagaaagaaagaaagaaaaagaaaagctgctgaggccaggcatgtgcaggggagtcctggcatggaggcccagagaggtcattgcatgaaaccatgaaagtaaagcctggattgtattggagactccaagacactggagatgccagagctataggatatctgtcaaggaaagctgtggacagggaacagatcaagccgaagagagaaaagtatgctgtagtcagcaaaactggaagaaccatctaagctctgctatcagacatggaattacagcatttggagttttccttttgaatcctgatgttgctttggcccagtatttcctcactatgccccctttcctcccttttggaagggtaatgtatcttctgagccattgtacgttacaagtatataatttgcttttgactttataggggggtacagttaagagattacctgagtgtaagaagaaattttgcacttttaagctgtgttgaaactgtgaaagactatggggactttggaagaattcattttgcagtataatattgctgcaagcctgtgggggccagagaggacaacttaaaaatggcttccataggctcatatatttgaatacttggttcctagttggtggaactgtttgggaaggattaggaggtgtgatattgttgaagaaggtttcaaaagcccatgtcatttattttcttatctgtgtgtgtgtgtgtgtgtgtgtgtgtctgtctgtctgtctgtctctctctctctctctctctctctatatatatatatatatatatatatatatatatatatatttctctctctctgccccctactggtgaataaggattcaagctcttggctactgctctagcataatgcttggttgccttctaccatgctccctgccattatgaacatgatcttaccgtttaaaactataagaccccaataaacttttctattaataaaagttgggaaattagtattctaaaatttatatcccttaataaaccaaaatacatttgtaaatcattaaggagtaaatgaaatgagggggtaattccccaaatacaaaaggtaagagaaaatggtaaaataaggaagctcatttggcaataagagacaaaagtgagatgataatgatttcctctatattgtaacatttttaaaattatttacaacatataaggaagctgtaatttcattatgttaaaatgacaaatgttccttacaagagaagatagaattatatacaatcattaaaagtgataattacattgttgatagttactttctttggctatttctgctggtagggacaaagctgtggatgtcttatgttctgtcttacatgtttttaaaaagttggcatatagttttctaagtaaagaaataaaaactaagatattaaataaagaataattcagggggagctggagagatgactcagtgcttaagagcactgactgctcttccagaggggacccatgtttagtcaccacacccacacagctcacaaccgcctgtaactccagttccagggaatctgacactctctcttctggcctctgcaggcatacttacacatgcacatgaaggcaaaataaatacttttaaaaaaatatttctgcaaccagagagacgaatcaacagttaaagagaatagactgctcttgcagaggacccaggttcagttcccagcacccaaatgatagcttacaactgtctgtaactccagttccaggtgattcaacaccctctctcttgaactccttggacaccatgcacacatgagtgatacattaatacatgcagacacggcatttatgtacataagatgaaaatctgtgataatgagatgaaactgaaaaccaacaagagaggaaacccaagcagtgatttcatagttgtatggtcatctgcagtcttgaaaaacagtcccattctaccttggggctgggagaaggaggagcactccacagagaaagggcactcagttgtagcaagcattactcaaaccagtgctcaatttcctgcctctaacacacacctaaaagcacaggacacatgcaacctcccaccccttctttctgagagcattatagataggagcttaatgaataaagcaggtgggttttttttctattttcattgtattctataggagcagaaccctttctggctaattttgtataaaatccaacttctgtaactcaccagtggcttaaaacacatttgctgacctgaaatctaaaacgttcgaaccggcaaggatggtgtaggaaagagcacaaagtatatgtatatttccttccaaatatgcttaattggaacatctccatccagtgccctgtttcatctaattcaaaaacagtacagtctgagcagccgtaatggagactcattaagttccattagctgcagacacaccgaatggatacaataggatccagctactattcacggcaacaggtggcacgccacaatagaaccctgttagacaaataacctggtcacctgaaatgggccctcttgctttttacgggaactcattttctaaaacacgctgtcctgtgaagcatattttaattatattcctagaccactggctgcattaattcaattgtagcttttcagtcattctgacacataaaacaaattcttgctattgtggtttcctctgtgcaaggtctgagtggaggaaagatgggcccagtgactgttttaccagtggggccattagccaagatgcttcaaaatgagataataagaaacacaatgataaccgcctgaaagtcctgtcatggagtgctcgctatgagcaaagcattccatggaggttctgctctcactgtcttcttttcaccacatcacaactctgtaaggtgggcatgactaccattcccatcacagcaaaagggttaggtcatgtatccaatgtcacgtggctgagcatcaagccagccagtcgacatctgacccaccatcacagccagccagctccctccgagaatcatctggaatcaaagcacatttttctggggaatcctacatgaaggacaagcccctggagatgctcacagatgttgctcaataaagccgcagccagacgtgaattcactgaagttaaagctacacagtgcaaatagggtgcacacggtgctgaagcttccacaaatcgtagaaaccatggcatttcccagacacagtactgaatgtgctgaaagggacaaggtaccacaggcatccttctccacagacgggagaaaaaggacatctggcaaacactgagatgacagcaccagcaaatattcctgctctgaacttaaaggccttagcgctttccctctgttcatgccccaaagtcatttcattctaaaaggtagatggttaatccttcctttggaggtaggcaaacatgcaatgacttctaaaatctccttatctcttaaaaccattgctcacttattcccatagcacccctcattgtgagctcctccaaaacagccccaacaaggatggcaatatagaaaaatcattgccatgggggctcattctaggaagaaaatgtatgatcattggaagaaattctattagacattcggagacaagttcaaaaccccatatttctcagtagccacacagtcacttaacatctatcctcccctcaagtctaagagaaaagtgtcacatcagggtcagagtgctgaacatattatggccatcatcaccaaagtacttgtttctaaatctcttaggttcttgggttctcaagttcaagagaaagatggtacatgagggttagaggactgaaggtcttaggaccatcaccactgaagtacttgctataatccctggtacccaggttcacactcagtattgccttgacttttaattactaccccctgtgaacaccatgtgcactgcctgggccttgcctttccagtcttctctgtaagtccctcttctgcctgcttgacagatgttagcactacaactctctggcactagctgcctgctttctactttgcttctctgtcatagtctctgctggaattggcagcagactcccatagaccctctcctgctccagttacaagttgcccagggcttcaggttcattcattccaagcctggtggctgtatcatatgtatcccatggtcaagaaatatgagccctgctgcttctccacatcgttggacacactttccctaatgacttcacctgtgtgggccaacacctttgtacacactgtctcctaatggcaccatctttccctgacgactccacctgtgtggatatgaggctccatcgtgccctttggctccatccaatccatactatacttcatgaattgtccctttgttccatcacactgtcacagccttggctacacaccttctctcacctggaattcctggtccccaactgacctctcaaattcacatactaattatcaggctgacacgccttcccatatcacagagtgtctggattcctttcttagcacagatagaattaggggctctcactgaccctgccttcattcatcatctcagtgggaacttctctgaccttattttatctccctccaggacttaaagggggatttgtgtttgtggtgatcagtgttgatcatcagtttgacaggactcagaatcacctggaaacatatctctgggtttacctttgagaatgtttccagagagttctaactacagaagaaccattatgaatgttggtggcaccatcccatgggcagaggtcccagactgaagtgaaaaggagaaaccaagttgaacaccagcattcatctctctctgcttcctggctgtggattccatgagctgcctcactttcctgctgttatgcttgctcttctgtgaagtactatagcctcaaactttgagcaaaaataagtccttcatctcttaaaatgcttcttgtcactgcaatgaaaactaaaaaatacagtatttcaaaagaaattttactcctaatatttgtgatttattttttcaactaagtggcactgtatctttctacccatccatgcatggcttattcctgttaccagggtgatccacacagctctaagaaattggcctatatcttacacctgtcagaatggctaaaatcaaaaccaccaatgacagtttctgctggagaggatgtggagaaaggggaatgctcctccattgctggtgggagtgcaaactagtacagccactttggaaatcagtatgaccattcctcaggcaaatggaactcagtctacctcaagatccagcaattccactcttaggcatatacccaaaggatgcacattcacaaacaaggacatctattcaactatgttcatagcagcattatttgtaatagccagaacctacaaggaaactagatgcccctcaaccgaagaatgaattttttaaaatgtggtacatttatacaatggagtactactcagcagaaaaaaaaaatgaaatcttgaaattcgcaggcaaatggatggaactagaagaaaccatcctgagtgaggtaacccagtcacagaaagacaaacatggtatgtactcagtcatatatggatattagacatagagtaaaggattaacagcctaccaggctacaatgcacacctccagagaagctatgaaacaaggaagaccctaagagagacacaaatggtccccagagaaggggaaaggggacaagatctcctgagctaattgggagcatgggaggaggggagagggagttagagaaagagggggagagaagaggagggaaaggaggacatgagggagcaagaagattgagtaagaggaagaatagaggagagcaagaaaagagataccttaatagagggaactattataggttcaaagagaaatctggcactaggaatatgtccagagatctacaaggataaccccaacgaagaatctaagcaatagtggagaggctacctttaatgcccttctccaataatgagattaatgactagcataaatgccatcctagagcctgcatccagtagctgatagaaacagaagcagagttccacagctaagcactgagccaaaaacctagaatccaggtgtagagagggagaagtgatgaacaaaggggtcaagaccatgatgtggaaatctacagaaacagctgacctgaacatgttggagctcacagaccccaatcagatagctggggagctaacatagaaaagaaccaggctgatagggaatgtactgtgtgtgttcatcttattgattattgaataaagtacttgtttggccaatgaaacagcaagttagacaggactacgtagagtaaaggattaacagcctaccaggctacaatacacacctccagagaagctatgaaacaaggaagaccctaagagagacacaaatggtccccagagaaggggaaaggggacaagatctcctgagctaattgggagcatgggaggaggggagagggagttagagaggagttagagaggagtcaaagaggattctgggaaatgtagtagagaagtggtgatccaggcaggaagtgacaaagcaaggagactcatatttaaagaaggagaaacaggaagtgtcccctttttcccctccgctattccgctagtggcgcaatgtgatccacaggcaataaggcatccaataagataagtcttataaaatatatagatttatgataattgagactgagctaacagatgagaatcttagtcattgtccaagcagccttgtacctaatacaagtctctctgtgcattaattggggccctaactcgggcgggcagctggcataaagcgcacacatggcgatgggcctccgcggcttatggcgggaagatttatcataacaccaggctccgtgaacatgggtgtcagctaggaggcctgggcagtctatggggcctctggcagtggagcaaggatatatcccgagagcatgaacagacttcaggagcccattccccatggagggatacactctcagcctagatacacatggaagggcgtaggccctgccccaaatgacttgacagattttgattgattccctcatgaaaggcctcaccctccctggggagtggatgggagatgggatgggggggttcagtggcgagcatggaggacgggagggaaagggaactgggattaatatgtaaagtaagattgtttctaagttaaataaaatttactggtctttgctgttgaaaaaaagaaagaaagaaatgggccaatgttcacaactatgtcacaaagaagacgactaatgttcaaagcagttcaatacgtttctccaagagcctagagttataggagtatgagcagagctgtgtcctggctttgccagctgctaagaagagcagatacaccacataaagcccaaagcctagcaggaccacagtattgcataagcatagcaatcaagagagcaaatggaggagaaggggagttcaaatggcaatggtctgaagagatagttgaggtaaattacaacttcatgggtccacaattaccatttgatagtcaacattttctcaatattaaatttgacctggtgttcaaccagctacacaaacacatatataaatatattataaatagaaaagtacaggattacatacataagacatgcctactataagccgtttagaaagttcctagcataagtctattttaagtgaagttgtgtttaagaagtcacatctatctctgtgatttgggggcatcagaaaaaaacacatataattagattaaacattctatagtcagtctcatgtttattcaaaagtgaagggatatatttaacttctgtcaatttgcttctacttgcaagaacaatttcatttctaaaagtccataaaatcatgtgcacacttccacactttaacacaatgccatacatatgcaattattatagtaatatatccactaggcttcctaatacattccctttctctaacacatctgtcctcattgctcaaacctaccctacccccttccagaatcttcaggaaccataagccatcttgagccagtgtgctcactgaagttcccccacaggcttgtccactgcccatattctattctggcctcttatggtaaaacccaggcaactcatatccagaaccatgaaaatttattttgtcatttccatatataacaaaggcagatcaccgtgtctccacccccatctatctttcccttcagtcaacctgctcacctaggctgtcctggttgctaattcgacctctcctgttctctctctttggcagtgaagttgtctccagccacaacaccagcaaatggtgaccagagcctgctacagaagtccacccctcaatcagccattgccctccctctgctgggttctgcagccactgctagaccagcacaggacctgcagggactgtgggtgtcacttcgctgagtatatcactccaccacatggccctccttgagacctcttctcttcaaactcctgacagcaaccttcctggacgaagctatgtgatgtagaacaatgcaaaccacaggctgcaagttctctcttctctgtgtttcctttatccttaaactatttcattttcttcacagatttttattttattgttttttttttctaagacagggttctcactctgtagccctggctctcctggaactcatcatgtagacccatctggcctcatactcacagagatatgcctgcctctgcctacccaagtgctgggattaaaggcgtgtgccatgatgtccatctcttcaaagcttttattactaaccgacactaatgtgtgtgtttcttggtctgcttccttgattatcttgtgtttcctgctcctttgtttcccttaactcctccacatgcaaacaatggaatgaaagtccatcagacagggactcttgtctcctgtctccactgaccccttggaaatggaagactgtccagaccacagtaatgtccaataaatagatacagattccataaatcatattgcaacacatgcttcaagttgtacagagcttagacctctggggtttgaaagggagcctttctattcttttagaaattctagaacgatcatgttgtttggtagcagttttggaaataaaaagaaatatacttcacctttctgatgtcactcggatttgttcctcaaaactacagttcagacctttcgtcttctcatggaaatatttttccacacactgctcctcaaagtcatgaagctttttcaggtcctcctcagtgaggtagagctctgtggaaataagcgtgacacatagaaaggaccattcttggagactcagtagggagtgtgccatttcctgatgtggattgtgtcccccatgggtcatgtgcgggaatcttggcccactggtaatgctgagatggtgggaccttgagtgattcctagatggtggagaccacctcaggaatggattaatgggctggtcacataaagctagatgctcctagttcttctacttccttgcctcacatctcttcaggcaatgttctccattccccttcttgcttctttcccgacctcatctccccctttcctacctcatacacttgcactacagtagcccttccaccatattgtaatgtgaccagaaggccctcaccagaggccgaccagaaggagactacaatcttggaatgtcggcctccaaatacagtagatccttgaatgaaggagatacaggcactgatgggcttgctgtcacaaaatctgcatgtagaatttggtttcccaacaatctacactggccagacacgataacaataacataggtgatcaagatgtctttacatgataaatgtattcattgtatatggtaaaattatgagaagtcacttttgaacttttcaaaattaagaaagggggtggagtaatagtatagtctataacaatcctagccatgcaggcatgaggacctgcatttcattttcagaccccacataaaatgacgtggtgtggcggtgctttctttcagtcccagcactggggaagcagatgagctgctcacacagtgatgagcattacacagtgtcttaagcagatgaactctagatcattcagggggcagcagaaggtgactatgaagtgtcacattactactacaattaatataatacaattgcaatttaatactgtgtctttgtatttgtttacacttcactacaagtggtactgctggtgttctatgatcatgatttttcggcattttatgggacaaaatggtaaaatacattattgtctatgcatgcattctatgtactcatactgtggtgatatgtgataacttacggtttattaaagcttgccggaggatacagaaagcaaagctagccacaagccatagaggtcaggcaatggtgatacacatttttaatcccagcagccacactagcaaaaccatggaggtcaggcagtagtggcacatgcctttaatcccaggactcaggagacaggcagatggatctctttgagttccaccctgacctacacaagaatgaagagtaacagagctcacgcctttggtcccagcacttgggatcacacaatttcaattactgcactaggaagatgaaaacaggagtaatatagctgagcagagaaaggaatgtaaggcaggaggagacaggaactcagagcttttgcctctgaggatttgtgatagcattgtctctgaggatttgtggagacaggacagccctttcagcctgagggagaggtcagacctagtggctgactgctttgcttctctgatcctcaacttaaatctagaacccaatacctaactctgggtcttttgtttttcatgttacaacatacctttttctatatgtatttgtgtgtctgtgtgttcatagggaaggcaaacatatgaaacacacatgtgtgcacatgcatatagaggtcagaggtcaaccttctggttgtgtttctgaagtcaaggtctctcactaacctgggacataccaatctgtctgggctgaatagcaagagagtcccagggatgccccttgtcagactgagcagggcaggacttctgaagagagctactgaccacggtcagtcagcacagcacaccttccctgaagtaattaattcattcattaaagggtacctcacccagtggcactgagaccaactctgtccttcatgcaacctcagcattcctgttcatacactgccttggctctcagtgagtgaaatcagaaatcacctttaaatgtgttcctaatacttgggaaatatcaagaggatgtgatgtcactaagaggataacattggaaagttctttcatgacttcacttaagtcagaagaaaatcaaatgttacatttctccataatttattaataatgcaaaaatttctttattttccaatctaatgagcaataagacattagtttcaaattgaagatgtgtttagctataaaataaataaataaataaataaatgtgcccacaactgaagcacaaagtattttgtgatttgtatggtgtggaagaatcttttagacattaaatgaaatgatcgtttcccacagtccccatctctgatgtcctataagcatgaagcttttcaggcccaggcatacaacagcagccactccctaaccccacgactcccacacacctgccaacccccgccccaaacttggagaatgcagttcctgagattatccaccaggtggcactgcgggcccatgtgtgctccgctcgatctttaaactttttaaaggggaggaaagaggccaggagaaaacttttgagtcaggcattctcaagcagtgcccagacctacacacaatcaacacacctatacacatgacgtataaatgaataagtgatttagaaaaagagaatctgctgtggaaaacatcctataaaccggagaaaggctccgccaccggaactggccaggtctagttagcccaggatctttcctggggttgcacaatgtactgagtcactgtggctttccaatgagagccaggttcagctcactatcagaaatggaaaattttcagtacgtgcctccacctcaacttcggttgtgcctttgtgtttgcttatttgtgtgttattttgggttttttgttttgttttagtttggtttggtttggttttttgagacagtatcttgccatgtagtccaggtctaccatgattcaagtccccccacggctcacctctccccaccctgagctagaatgacaagctgctggtggctggctctttgcttccttctaatggccaaatcacttgagaagaaataaggagtatcattaggtgtgcatagcagtgttcagtgtattatcaggtgtgtatagcagtgttcactgtatcatcaggtgtgtgtggcagtgttcactgtatcatcaggtgtgtatggcagtgtttactgtgttgtatcatgagacttcactacagtcttcactctacactacagtcttcactacaatctgccaccacaccagacagtcctagtgaacaccccagctccaattccacacaactacaggtggggaacatagtgaactgtaatgtaaggacagagttgtctgctcatatacaaatgtaattgtttaattatcaaaatagcaaataatagtaatgttttccccagcagaaaaatactaaaatagcatgtccttgaagtgtgttatgtgatttttaaatctgctatctaagttgctgagtttcaaaggagtcattaaaagaattttggcttgggattatatggctctaaatacacttttgccttttgtaccatgtatttatggaaagtgattcctagcactgacaattacaaaatcaaaatgtccataaacactgaggacactctataccattaaaaataaaatagtcaacattaaattctttgtgcaaaacaacaagcacatccatctcatcgttatgtaaattagctttgtctttaataaactgatacccaaggatttttttaaaatttttaatatgttgggtattttgcttgcttgtgttatcacatgcatgcagtgtctatggatgccagaagggggagttagatcccttagaactggactttcagatggttgtaagctgccatatgggtgctaggaatcacactcaagtcctctgagaacggccagttctcctaaccactgagttatctctacaaccatgcccaggattgcttttaaataaatgtcttcgtgatttgttattagtatgtacctcttttatagaagtacataccctgggtcacacccggaaaaaaaaaaaaaagtaagtatcctgattcaaacaaagcaaaatgagaacacatatttccatgttcctgcatttcatgttgatgttttgaaaataagaaacatccttttcggaccctcttctgtcctaggatgaggaaccagagctgtgattctggcagagcttgcttctttgtttccctggacccaggcctttcgagtcacctttttacacaacagggcagtaagtacaggtcaggtgataactctaagaggtactcagaggagttcccaggtcagcagagaaaagccaggttttctaaaaggtctaaagcctccttgaattcaatctcctgcttctctccttcaacataccatttaacaggggcaaaaatactcttgagaccccagacaaaggtgagggtctgcagcctgtctgctgagagccttgatgctgtgccctcactggaatgaccaggctccagtgtctccagcctttatcttcctcctttctttactccctgtgtctcaaccctttatttccttccctccttctgttccaccagagaaacttacttagccctacatcaccctcttcttggtcctgtggtgttggacggcagcatagacctcggaggagcaggcacaggtgattcagcaggatgaagggtgggggtagccagggcttctggtggtaggtcatgatgtagcgatagcgattgtatttccagagtttattggagatggattttatatctaagtagatgttgctgcaggttgagaaaggagaaagagagaactgtttaatatgggaccctgaaatgtgacagactctatcttccggctcttctgattggttaacagtcatcagcagtcagccaataagtattatccacttacaagttttctttcatcaaatagagtaagcactttttacagctaagtgtgttcactggaacaatgaacaaaaagcagacattgaaatcagagattagaaaaatgacagcattttaggcagggaacagaaactgccccatgtcactcagcactgcatatgaggcacctttgcttgtcatatgtgatgctcttttccaaaacacaattcatccttcattataaacaagggtgatgtcttctatgctgttggctttataaacatatccctcataggcaagaagcaagcactgcgacaataatgctagctaaacattgcaacagaatcatgtgaatgaagaagccataggagagcgtttgtcaccaggagggtcagtggattgataagcccggagtgtcagcagagctggatatagaaatgtgacttccagatatacatacaggaaactgaacacgaacgtgaaaaagtacaaaagagaaaggaaaaggcgcaaggtctagggccaagaacttttgggtgtgaaatggtgaagttgagccagaaaaggagactgggaagaagaagctgactgtgagagagaagaaaggaggtgagacagacaggggccacatgaggaaagcacacataaagctctttgtgagccgtcagctctgaccatcattcagcaggactccgactacacggtgacagcccagatcttctctcccccacttcagttaccacttccgctatcccttatggtctaatggtctaagagttccaattctttcctacaaataattttatgtccttgctttaaagccacagtaacatagcatgggacacacgtaaacaaaggtcatatactcaactcgcagaggaatatgttcaacttagctgctcctatattttggtaaacaaaatggccatagttaatgaaagttacctacttgaagcaggcaatcagcaggttcaccatgatgatgtactgaacaaagaggtagacagcttgcaggaatggagtcaggaaagaacccggagggcaagacgtttcacctgaacaaactacaaacaaagagtttaagagtgggatgagataaatcacagccctggggccctctgtaaatatttggccccgtaactcacagcatgccacacactttacatgtttaaaagattctcgtgaattctctccagatctgtttttgctctgagtgtctacaggggttctgtttctgcatgagggcaaaccccgtatgtaccatctatctctgaagcatagacttctccatacatcatccaatatggctcgaatacaatatctcgagccaggcgccatgaaggaggctcatgtggtgagaggatggctttgcgcgccacgccaaagctcagcaggacaatggccatcatgatcacaatgtagaacatgtttgctgcctgcaaaacagcacagcacaaccagaatttaccacacatcaagccctagcagtcatcactacacactagaggcagcagacagtctagtcggtggctaaaatgcctccatccaaaacagctgagttgtctctggctaagctctttcctttttccctacacgggatgtgctttaggttggtgacatctgtggagtcacatgatgtgcagaaattacaaatactctttctagaagcagccatcaaatgctaactgttttgactgactagcccccaacttatgaccaattaaatcaaggatgtggttagaaaatactttaaaaggataagacattcgaattattccaatgactattcccagaattatgtcccagagttcccagagccatgtagtatcaagagaattgattatatcagtttccctccatcttgcaaaattcatcaactcaacccacttgttcagtgtggcagactcagaagtcaccagtgtttccatttcctccacatttcttaccttactaagtggtaactacaagatccaagtagccagtagtcttgagagtgacaattgggactttgcccaagctgttaaacagtgctaaactctaactatcactgttgttgctgcccaaggagccctggaagggtcaaagtggcatggctacgccacacaaagggggaaattctgcatcctggagtcaacacttggaaaacccatcatacccagcttcagggagaaaataccttgtgccaaatcactgagatatctcacacagctcctctattaaatgtgatgttaccaaaatcagaggatgcatttatggtagaagagaaaagtagtaaaggtaaagaaaatcagagggctggactaggaatcagcagtagagcgtctgccttgcctctcatgcacgaggccttacgtttgatccccagtcctgctgggaggagaaaaaggatgagagaaagaggaagaaaataagaagcagggagagatggaagtagaagcagcaaggtccatcttgaggctcttccagtcctttatttctaaactacccctggtcctccagagcactgcctttcctgtattagagaagcaaatgccaatataacagtgatgttgtgcatagagagggtagatgtttgggtattttcaaaattccagatggcaaaacctggtacaatgttcagcaagctcagtgcataaactagagccaggccaccgacttcagaaggaagcatggatccccacatacgctcatgaggaatttacttaatgtccatttccttgtacacaaaagtagataatactacttatttaattaagttgctgcaggcattatgagttaatatatacaaaatacctagtacagtgtgtggtccatagtgaatactacttaagagtaagagaaagccagtgataaaagaattaattagcactttcagagaaacgtttggcctcatacaaatcaaagacaaacgtgactcaatctcatatagtcaggcctcaccaaaggctaaactaagtgttcctattaactacccaatgtgctgtccaggcccactttacatacaagtttatgtttagcccaaaatgagtctatatgcctctagaaacagttcagacatttgactagttggttagggagatggctctgttaaactgcttgctggacctgagaatgcactcccagaaagtatataaaagccagccacagtctggagagacagatggctcctgggaatttgctaggcagccagtctagacaaaacagagcttcaagttcaataactagcacctgtttcaaaaaaataaggtcaagagctatggtggtttgaatgagaatggcctgtataagccaatgtatttgaatgtttggtccccagtttgtggaactgttttggaaggattaggagatgtggccttgttggaggaggtgtgccactgggggttaggggcttcagagcctataccatagttagctttctgtctgccttgtgcttgtggattagatgtaagctctcagctcctgctccaacaacatgcctgcctgtctgcctgcctgcctgcctgcgtgtctgctgccgtgctctccaccataatggtcaaggactctaatgcttatggaaccatgagcccccaaattaaattctttctttgataagttgccttggtcatattgtctcttcaaacaactaagacgagtgcaatagtgaagggaaaccaacattgattcctgccctctacacaggcaaacatgagtgagggcacccaaaaacaaatacgtgtgcacacgcatagatcacaagagagaaagtttaagtatgagatatgaaacgtggcagtaaagccaatggggcatttgtgtaaaaacatgaggcttacataccatttttgcaatcatggtcacatatggacctgcatgttggttcactgcaaagaagtccatgagccgagagaaccagaatatgatgtctatgcagtagatgagtcttcctgcagtgtgcaaaggggggtgtccccaccgtaagccaaaaccaactgaaaataggccaatagccacagtttctattaggttccagtattcactcagccacatcttcaccttttgagtaaacttgcttggttctgaaatgcatatctaaagggagaaagaggaaaacttaaagaagggtacagggctggggattaggtagagtggtagagaacttgcctccaacatacaaggccctgggtttaagccccaaaaccacagccaaaggggaatcccatcaacatcatctttgtaaatttattaaccttcacttaaagagtaaaacaattcctaccaaattttacatcaacaccagggcatttctgagctcagcactgcagcggctctgcctgtgattctgcttcaggagctgagggcaaagaatgctgatgggaaacccagcagtcctgtgagctggtcctattgctgctactgagtgagctcttggcacaccactaagaacataatgtggaaacttactactataagaaatgccccttgcaatgctatagcagacacaccgcaatgtaaacagtaagcatgtttaccctaaaatacaaaaacagtggtagaattcagatagtgtttctctgttatgaacttcattagcagacgatgcagtgtaatttcgaagaagatgcttactgagcatagaatgttggcgaaattaccactggaaagacaaatgtatagacatccagagacatgcacccatagctaggacagtcaaaatcataactacttggaattatatttacaattgtattaagaatgctaacttttaagtgaccagtggcaatgtagaaatgaaaatgtcgagttttgtttctttgactcctggaaaactcccagaaggatatttggcttcagttttctaaggtgtttactaagaacttcctcatgtcatgggtgtattccttacatattgtgcaactttagccactcatgtgtcactctgttgggtaaaactgacaatgtgtaggtaagactaggtgattaaaaacccatgtgaccaagagagttacatcatgggaagcaaacagttggagagttcaatagcaaatagaaggcattgcctatttctctgagtaacaaacacaatgagactgtgctccaaagttcagcagaaagtatttggtaaggataaaggaatgaaaccagaaacttttccccaagcaagcttcttacagcaaatttggaatcagtgtgctctctctctcacacacacttgacatgagtccattttcatttccaggacttagaacacctcttccaggggttcgcagaagacacagaaggagcactcacctccctgaccttctcaatggcattggtgaagatgtaaatgatgacaagccactcttgcacgctgggttcgggctgcatctccaccaacactgtgtaagtgaacagcatgaggaatgccaaataagccatctgtgagggacacacattccctggacgtgagctcaaatgaccatgagggatgccaagcagagctctgcagacagagcccagaagcagcatgcttctacatgacaacataaaatataacttgaaccatcttctgatcattgatggctcgatgtcaaggaaaacgtaagtatctacagtctaggaactaaaatccctgtttgccagtaaagggaggagatgctatcctattagcactactcattgcagcatgcacaccagcaagctagtaacagcctaggaaagaccctcacgtcttccctccagtttcagcttggaaaatacgtatgccaagacagccagatgaacagtgtcagtagatggatatcttcacagtaagctggtattcactaccactagagtgttagtttatgatgattaaaatgttattctggctagagagatggaaagatgactcagcagttaagaacacgtactggtcttgtttgagcaactgaattcagttcctagcacagcttacaactgcctgtaactcaagttccagggtgtctggacctgtcttctggactctaagggatacctacatgtacaaacatacatgaaaagcaatcaaggatagcactctggcattcacatacacacatgcacagctgcacacacacacacacacacacacacacacacacacacacacacacacacatatgtacacatgaagagattactaatctaggtataatatacaaagtaacatagtcgacctgttttcaggcagagtgttgagttacatgtgcacacagaccacagcatacatgtggaaatcataggacaacttgtaggagtcagtcctctccttccaccttgtagagtttgaggtcaaactcaggttatcaaggttggcagcaagtgttcttgccttggagccatcttttttaagcacctcactttattttttgagtcgtggacattcactgaacctggaactcactgatatagctggactgactagccagcgagctggagggatctgtctgtttctaccttccgagtgctgggatcacagaaatgttgcaccaggcctaggcttgaacatggatgctggggatctgagcctgggtcttcatgtttgtgctgcaggcacttcaccaactgagcaatcaccccagtcttagactcaatatttagaaatgggtaactgtcatccagagctgtgtatttattatgtgtagcaagtatgtggatgtaaagtcaatattctgaggtgctaatattatatatatttagatagacatcctgttataatcacacttcaaatgattttggaatataaatcattggctgtgatcaatctatgtataggtaaacattagaaaaataagtactaccaaataaatgtgagaaatgttcaatacatgtatgctttctctgaatggccactacccagagcagatcagaatttgatcccacaacccatgttctcaatagtcctcttaaacttaaagcatatactattaaaggccaaaatttaaaaaataaaattactcttacaaaacaattggttcaagtgatgatttttatttattacttatttattttgtctgagaaagaaaaagaacccatcagctaccattcatctttacattcagggctgttaagttcattgaacctaaacattccaaatgctcagtcttggctatgctgagtctaagcactccaagagaaaaacacactctgagaatggtctcacacctgtaatcctgcactcaggagcagacatgagacgactactgcaagttcaaaaaccaacctaaactctatctacctagtgagttccaggctggcaagggaagacggtgaaagtctgtgccaaattaaacacaagacaaagaagaaaactatccaggatggtaggggcagtgagaaaaggagatgttcattcagtctacacacacacacacacacacacacacaattttcttgtcttcttccaaccctcccacctgcctactttgttatcttcctccccctttttttaaaaaatgaaattcctacacttttatctcaggttagcaaatgagacataccattagtaacattatcataagctaattaattaataattataattaacactattgtaatgagaccaaccgtgtaaaaccaaaacttgacaaagggagcactgtagaactcgtagactctccttgtccaggggaggctctggggcccatgtcttaagtcaaagtgcagattttcatccagtttctcatcagggcctctttccaaatcatagtttttctgaaaaataccaacaatgttgtaaactaaaggatgtaactaaatggtagaactcatgtattatttgtgtaagatcctgggttcaatttccagatcctctgtcactactaagaataataaacaacaatacatatatatatatatatatatatatatatatatatatatatatctcccaccctcctgctttttgagatatggccttactatatttccctagctgggctggaacctacagagatctgcctgcctctgtgtctcttgtactggtattaaagaaatgaacccctgaagggggaagtccttctgtgtatattttgtcttactggttgataaataaaacactgttggccaataggaaagcaagataggggaggctagtagtcgaggaggattctgggaaatgtaggaaggacagcaattgccatgtgatcccaggaagataggatgctaaggccagcatcctcaataagtctttataaaatacatatataaatggttatggttgataattaagactgagctagcaaatgagaaataccatcactggccatcaacattgtacataatataagactctgtgttatttagggggcagcagaactcaggtggttggtgggaagagttatctttacacacccccactgcctgccatcattatttctagctaagacagctaatcttagttaccaacttgacatatctgagaaaaggaactctccagtaaagaattgcctcatcagattggcctgtgggaatgcctgtggggtactttcttgattgctgatctgtgtaggaaggcccagcccacggtaggcagtaccacccctgggcaggtagacctgggttgtataagaaatgtagctgatcttgccatacatcattaattttcagttatgtttgctttctctctcttgcccatacctcctgctcaactggcttttcatttaaaaatccctctttttctttttgcatcttttgctactaatcttgcctggcacctttatcccttccagtcttggtggccatgctggtctatgttctcttcaattctagactgtcttcttatgaaactatcctgtgcaattaaggcaatgactttcccacagcagcttgtctcactgtttccctggtgagtaaaccaaaatgatgttctcttacaagacatacaagagtctcacaaccggcttttcatgtttccagccatgctggcaaacaccatctgcttgtccagtacccgccataaccacacgtccaggcaaactgccccacttaccatgcttatcaccctctgcctcattacttcctgtctctgtgacctagttacagtttcatgaagttgtcatcaatccctaatcctcacccactggcctactgcaaacagccattcctctttctccaagaattttccattccattgtcatcatatagcattttcctgggctagtttagaggtcacactttaagagattagcagttgagtaacttaaatttctcttaacaaaattactgtgcctgtggaaatttacaaaaagaattttcacttagcatgaaagtgtagccatgcagtcctagctacttaggaagctgagatgggggaattacttgtgtccagaaattcaaggccattctaggaaatacagcaagacagtgcaacactcatgtgaggaagagaaagacggagacagagagatggagaagttggttcaatacagcttcagctccccacaggaacaagaagactcttcccttctataaacttactaccacaaagacacattaaaccacatctgtttagattgctgcctccagctttctcccacagtgtaaaccatgtattcctctgctaatcaattacatttacctaagtagtattatgaactcatatagattatcaaatctgccagaaaaaaaaataaataatgattgcagggaagtgggaatggctagtgtactcaataattttttattaaaatgaatacaaagagtaggaacaaaatcgatttttattatcacaagccattcataacagaatacacttgaacaactctttcactaagtgtttcaaattgaagaatgctaaggtttcatggatatttttctgataataagcccatcatgacagaggccacatctgccttagtgtaactattgagtcaattcaacaattgatacggccacatctaaaccacctaggcagacaactgctacagcaggacacaagtcagggggtttcaagaactttctgtatttttttaatattaaaggcacatttccttccattctgtgaaggaactgtgtcccctttgagaatagttccaagagtaatgcaccagttcccacaaaaccttcaagtgttcgtgagtccaccattctacagagtgagtgagagctaaaagtagaattgtgtcataccactggcaaactatcacctatgtcctgtgagatttgtgagtaccttctaaggtgatgtacagctttcttctttgttctgcttcaactaccaaactaaacttggcatgcagaatcaagcaggcatacatccaagcagagtacccctgcaccaggcctgtgtgatgtcactaggggtggggacatccccgcacttcttccctttgctgtgtttggacctgagaccagtgactagcccagagattcctcatgcattctacagacagtagacggtatttggcttcctggtttccagggattaaagatggaactaggaagaaggaaggaaggagaaaggggagagagaaagggggatatacacacacataagcagaagcaataactaaaatccttactgacagggatgaggcagatctctggggcttccgaatgcagatgttcaaccagtcaccaacaactgttagccacaaaagtaatcttcatttagtatttggagaacaaagactgtttaaataaatgtgccaagtgccagagaagatatttaccacaccttggggcaaaggcagcttttggagcagtggtcatcagagtgggaacagagagcaaagagagcattcacagcatcctggacacctggctgtggcagtcaaatgctggggaagtggctcccagcccaggggagaacacacatccagaacccacccacaaccactggtggtgaaggatgagatatgtgagagggtcaacaaaactcttttgttacgtttgcttgagaggtacatgtgtatcacagcatatgtgtggaggtcagaggacaacctgttgcagtcagttctctccttcctccgggtgaggtcaggtattgaactcaggttgccaggcttggcagcaagtaccttcacccactgtgccatctctctcaggcccgtcaacacaaattctaaaggcatctttacagatgagaaccgtaggggtgtgtggcagcgttaatggagacttgaagtagtaagctgacctgttccgctgctctcagagcaatgctgacacagttgttggacatgatgactttgtctttgaagcagaaatgggatactttgtttacatgctctacctaactggtatataatgagatggagattacacagagagaactaaatgcttgattgatgaatcagccctgggcttttagagtaatgcgtagccccagggtattttgtaacttcactggactgaaacattggccagaaattcaaagccattctgggaaacatagcaagacaacaacaacaacaacaacacacacacacaggtgtgtacagggggtagggttaataaataccctgttaatagtaaaaaggcaaacactttgtttaacagatgcctatttacagataagctccatgcttgtgcgtctccacacactgttatgccatggaaactcaattgactacagaggtgtactaacctcataagcactttccttggtgttgttgagtccctggtcactgtaattccacgtaaactggaaatcctgggattgtgggacatgggacatctcagctttgctcttaaattccaatgtcaaaatcatgggaggtaataggatactgatgattatctgcaaaggaaacaaggcaaaaaaagggtgagcagaagacaaaggacgcatgcactatctcaacaacagatggaggaaagagcattgtagatagtcggatccagtcctggctcaatttccgtcccaagtctacatatattttaactcaactatttcagttctacaaaggtgtcccttagctctgtgcaaaggtgaggtgttagtgcacaactgtttgcaaaggcaaaaaagaaaataatactaaaaatctaagggtccacctgtacagcaatagacaatatggaacaacctaacagtagaatacaatgttcacattaaaaaaaggaaaatggaagggctgcaaagatgtctcagtgaaccaaagcccttgctgctcttgcacaggacctgagttcagttcccagcacctacatgtcagctcattagagtctatagctgagtcctctggaaaggcaggcagccaatgctcttaactactgtacaatctctctagccctgacttgaaagtttaaaaaatacatatgtcacacttgtttcccctggaaaaacctgtacttgagtaggaagttagaagtattatttttgtgatgattgcattattttggttgggcgttggtggcgcatgcctttaatcccagcacgagggaggcagaggcaggtggatctctgtgagtttgagatcagcctggtctacaagagctagttccaggacagcctccaaagccacagagaaaccctgtcttgaaatacccaaaatactaatactaataataataataataataataataataataataataatttaaagtcattcaatagaaattgccatataaacaaattttacatcataaattttagaaaataaaagatccatctcccgcacatcgaccccagatgctgtcggggaggccagtacaagactgatccaaacccctgaatatggatgtcaataaggaggcctctgcactccagggagcctctggaagtggattagcatttttccctggtgtaagaagggactttgagagcccatcccacgtgaagggatgcactctggccctggacacatggggaagggcccaggcccagcataggaagacttggtggactttgcggagcccccgttgagggccctaccctgcctggggagtggtgggtggatggggtgaggggtaggttgggggtggaggaggaaggatgtgggtaaaaagagggagagggagaagggacttacatgtgaaacaagcttgttccctaacttgaactaataaaaaaatattaaaaaaaaaaaaatccatctcccaccttgtacaaaccatcatctgccccagaagatctcagtagaccatcacactttacacataaacagtcttttgagggaaattttatgttcaatttttataggctttcaagataaacagtttaaaatatttactacatttgttaaagccaacttggtggatggatgctctgtctttcttccaactaaagttatgtctcagcatcctggagttcactgaccaaaagttagattaacctgtcagccgcccttcctgatttagtgcatggagtcaaaggcttgccaaccttgccttctttcccatgatgaaatgacatactaaattttgttttaagctgtgatctgtgaagactctctaggctttagttctaacacgattgtcatttctgtcccaaatatgtgtgaagtgtaaaaactccatagtcagtcacagtgacagcatcatgttagttctacttccgggaaggcctccaatcccactgccctggagaagcagtattccaccacagcacgactgcaatgttggtggcacacgcctttaatcccagaattcaggaggcagaagcaggcggatcactgtgagttcgaagccagcctagtttccagagagagtgctatgataggctccaaagctacaaagagaaaccctgtcttaaaaaaaaaaaaaaaaaaaaaaaaaaaaaaccagacttctaaagagaagttggagcctgacatgctaaatgtcccatccaaatagctctgcatggttctcctgtaatctcatgcacttgggagtgctctgacaagggcatcccaaactgatttgcaaatgggtagggagtctggggaattcatacagcaagctgcctcagccttgtaatcagtgcgtgcatgtttggaggaaaacattaaggcttgccttactgaaaccaatcaatcaatcagtcagtgtctctctctctctctctctctctctctctctctctctctctctctctctctctctcacacacacacacacacactcacacacacacacacacacacacacacacacagacctctcacattatgaagtataaaaaagacaaacatccattaagctctcagtgacagcattctggaagctaatctaaagtgtggactgtagggggcaaacgctacctcaggctctcagctgcagccttctcagccaggaatttacaagcagctacttcaaagctgggtaagcagaggccgacccaccccccccccctttgtcacttccagacctgaagtcaaaatggatcaaaggagaactttgagaaatgatggctttttctctggtatgttgtgaagttacaggagataatttttgatggacatttatttttctaatctcatggacagaaattaaaacacacacagcccttcccgatcttgaaatacttactttgttgagttttctatagtttatctactaaaaatatttatatttttataattgccattctgtttaagatatactataattttaataactgtaggaagaacagaattaaaatgcaaaatacagttttgtgtgctcttaacaacctcatgttcttccattgatttcacaaacacacgcactttgacatgctcaggctacacagcacacattataaatcttggcattgaacttaggtgctcttttagataactgaggcggctaagaatttagatatgatgaaagatgtgagcagttgctggaagagagccttatgaaaccaccatgcagtccctgaagcaataccctggatgagggaagcaataaaaaattgctagttctattcagtttcttgtctattaatatttatttattgtgtggcactggggaccaaacccagggcctgtgtgtgtcgttcaaacatgctacaagtgagctatgcacccaaccccatctgtattctcaagccttgtttctgttggaactctcagaaacactgccatttggcacagtgaagtgttgcttttgtttgctgttaactctgattgcccgcatatgagaatggctctgtggtgtcgggcaggtacagtcatcaagttctgaaagtcactatgggagagtagtttagagatttctgaaggatggctgagccatgcacctgcaggaaggtattgtttgccagaggacccacctggaactcaagagcactgaccttcactgacaatatgccatatggaaaaagaatgtaccttcagccaggagtttttcctcatttttagacgccccatccacatgtctgtcagcagcatttgggtacaagaatgtgacacaaaaggacgcagtcctccagacacggccagtttcaagcaggtggaattgctccagttcttgagttcataggtcagcagtttcatggccattggctcgttctgcttgaaggccttctccaatacatccagagcaagctggccgaactgcctgatgatacagtgatgaacagagaacacaaaaggccagtcagagccccagaaatgtcttcagagattgactatgcacacagaaaacactggttaattgggctgtatgaccaaaacagaattaggctgtgtaataaacagcaatttaagctatttaagtcatcagaaactacggcagctactcagaaggtagacaacttgtcctattttcctggtagtgcaaagtggaatttaatgtttgtgtcagaagccattccatgctctgtgactcactacattcatactggtgtgggtggttctacatgagaagtcccagtagagaaattcagacagaagacactgtgtccaagaaatattatgctattatgtttttacttttatcatatatattccttaaatacttaagaagctagacccaaaaaccctcaggcgatttcccagaaggctttattctctacaaatgctgcaggtctgtaaatcaagctatagattagcttccatcattcactgagcttccctccatccacaggactatcacactttagtaatcagattaatggaaacatctctcttctttctcagtcccaccagttactttctggttcttcactacagtgtgtgtttgctccccagccttaaagacacctaagataagcagccatcttaactaacagcatggaagactttggggctccaaaggacttttatgtcattcgtttcaaaaaccattaaccgttcttaaggaactagaggctaaaatctaattggctgatccacacaataaaaaaaaaaaaaagttgcccatggaacacagcactcctcactggaaagtgacatctctcctatattccagagttccttctgatctttatggacctttactacagaatgcatgaaagatgcaatgtgatagtcagcgttggttgctggatggacaggatcaggaaataactagaaatcagtattacactgtgtctgtgatcatgtttccagggcttggcatgagtctgagttgaactacataaagaagatcccttttctaggtggatggccaccacctggtcctccaggggcccaaagaggacaagtacagaaagtgaattggcctctgtccctcagaggtgagataactgtcatgtatgtgccctggacatcagcagtccaggctctgcaacctgaagattctacagcttgtagcaacaatgcccttccccagttcaaaggacttaaactgaggctcctactacagatttctctggttctggggcctctggacatggacttagccatgtttctggtctctctgagtctccaggctccacaaagtcttctcagctactagaatcacttaggcaattctcttacaaatcccctcccatgtaactatctatacaccctactgactctgtttctcaggggatgcttgactgaaacacacaattctaagtaaatctacttgtcccatggtaaagtgaaggagaaagaagtgtctacactttctaaaaactgttgtcccttagtgtgaagtgaagacagaagacctactctgagtaatttttcaattcctctgaggtatcgtccaccatgttgctctccttagcttcccgggccatggccctatatagaatactagcaatgaccgccttgactgtggtctcctctccatgctgccagaagaacatggccatcttctgcctcttcatcagcacagcccataccagaagatcattgtatgggtagacaaaaccagcagactcggggtcctctgataggctgtgtatttcctttgacttcttctttgacttatgagagtctccaggcttgtcctattgcaaaggagaacaaaagcctaagaactccaatacgtgatgcttagttaaatataacacagcaattatcctagagatactttttaaaataattactgcctatgttagatcccagcaaaaaggcaaaacaaacaaaaagcccagatagccaccatagtagaactgttagtacaaactatctggcaaaactgatacagtgtgcccttctgtataagacaaacaaaagcaatcagttagggatgtagctctgtggtaaggcaaccaactgatatgcacaaaacactgagtttaattctcccaactataaacaatgcatgctttatagaactacaacataggacttagacacccatgaggactgagttcacagtcctgactccaaagtgagaccttgtctcaaaaatatgttgaatatcattaagataaaccagcaagcacaatttgcactttgatggtaatctatttgggtaagaattttattttaaatattctctacttctatcttagcaagttgatttgtcattgctcttttgaagagtaccactagtactgccagaatacgttcaaatagatcactttgttttattttattctggaacaaaaagcattacccaaccccctccacaagctgaccctttgcagctcaactaatacagcactcaaactccctgtgtgcctttgcgtggcttcctgtctctgattcagtgtcctgtataatgttattcaccttaagataagtggaaccatttctcagtcaccattttatctacctctacctgctcatgtccccagttcaaccaagtactcagcataatgcttgagaaataataaaggtttaaaaataattgtttgtaatttgaagcatcgtggcaaaaaccattagaatatttctcttctctttctatggataaaaagaatttattcattaatggtggcaaagggctgtgccagcagctgggggaaagcaaacatcttacagaaaatagaatatgatttccatggaaatacctaagcaaaagcattctttcccagagaaaacaggctaacgatacacattcattatctttgttatattgcaaaattaggataaaactaacttcaagaaagacttagttagggaaaagaagatacaagagaaccagcttccaaaacctgaaagttacaaatggaatggtcctcatatccaaccaggcttgagtaaggaagtcaatagtgcagtgttaggctaatgattatgaatgttaaataccatggcatacacagcctgcctgagtcaccaactgtacaaggccaaggtaggaataaggaagagaacccaaggggaaagcccagacaatcactgggttgtcagcgctctgtattgttgaagaatagctgtgtcagcagagatgcttgtgaattataccatctgtttatggtcctgagggatgattcttcattggcccctccctttctccagtgtcaaatgaaggagacatctcagtctgcaaaaccaacttcatcttccaaaggagtgtaccttggatttgtagggctgtgcagtcctaaagaactgggaatgcagtgtgctttctgaagattcatgtctacttcccaaggaatgccgctggtgaagagggtgctgggaaaggctctgagaaaagctggtcacactctggtgtatgttggtatttcattttataaagaaagcaaaagggagagatgttttaaaaaaagattataataataaccacacattctttccagacaatgatgaaagctaagtatgtgtccctacaaatgcccaacatgattaataattaatgtctctggagatccatcactcaatagcctcccccaatctccttctgatgaacactactatttcctgacattttagagaacatactcttttgttctctattatatacctaaattcctttcctatgtggcaattcctttataattaatggatggtctagcctcgcaacaagttcaaaacaggcaatacaattttatagtttatagataagaaaaagcttctattcacaaagagctctaaggtttaggtgaagttagaaagttctggaatttttccaggtaccatatgatatccactgcatggggatcaaatgaagtgccagcaaggagaaacacgaatatatagagactgacataagagcctaggatataaaccccagcttttgaaaaactctactctccttcagtttgttttatatggataaaaaaatgaacaaagaaaaaatgaagttaggattgctcagtgacatcacccaagttactttcatcattattatcatagagaattaataacatcaacatgatgataatcatgagtattgttattaagtcactcaaagcttgctctgtagtaggatgtgaaggggttttgtaatctcataagtttgtgaacaggacattgatatgcccagttcatagatgggagagtgggaacacagattatgtttcattatgacatcaaatggaatttgatgtcaaaccacactgacgccatactacaaagatgttaggattgtggtctggctgctgtctaaactgaaacaccaattagtgaaatgggacatgttatactgaagggccatttccagaaggagcagcaatggagtctcctagttagctacaaaccagctgcaccaaggtcacacagtgaccctgtagtcaccaccacacagtagtgtcacttctttcaaaggaaaaagctgatgctgggtgtcttgtggcctcataaagctcagcagaggttatttcctagatgacatgtggttttccatattgcacatggttttgtggggagtgctttgcttatttcttaaacttaaattggactatcacttctcccaattctttataaaggtcccaagcagctggatattccaggttcttcatggaactccttccagaccacgttccagtctcatccctgtctgcccacaacaaaagtctcagtattgctatagaaccctgcactgatgtctaagcattgttcttctctgttcccactttcctctcctcttcagtgtccagtgctccttttctggtgtctgtatgtctaaaaagagctaatctcctctaattatgggtcaatgatggcaacactccttttataatcttggtcttccaaaactacaacagaaaatatattatctgtaaaaccttttctctttttaagctcactctgttttcatcttccagtataattcttacatgcttagcccaaaatgcagtctctggactatagaggctattgttcacttatagaaataaatttattaagagtttgacctttggccaagcgttggtggctcatgcctttaatcccagaactcaggaggcagaggcagtcggatctctgtgagttcgaggccaacctggtccacagagtgagttccaggataacaacctccaaagaaatacagagaaaccctgtctcaaaaaaaaaaaaaaaaaaaaaaaagagtttgacctttgacctctctgttttcaataggaagaaaagaaaaaagcagctgttctctagctagattcatcacacagcacttctatgctcatagagcacagcatcccgctctgtattgtgggtaatttacccataaatctgtttcttctatgaggtttctttatatctacctcatgccagtacacaaaccctttgtacagcactctacatacagcgggtgacatgtgctctcagatgagaggcccattgacgaagctactacccctgggactccgttgaccattttcttaaaactaaactttgcaattccccttccttgcactgaggcacttttcagtgatgttaccttgcgttgctttctgtagaggttgttgtagagaactctgaaacttttcctagtgtagctgcttcgataggctccaccaatgaggtactctattaccagcccaatatcgatgagcgttattctgtagcttgagagaagggtatgctacaacaaagatcaaggcatcacaactttgttcttcaatatcttctatatctctttttctatgctctcaaagggcaacacacttaacttatccatctctttctcttcagcatattgtgatgaagatttaggaaataatttaggcaagtcatttttgctatggctcaaatcaatgtaatttaaatctgtatcctcagagacaatttttcttactgtaaaattgacaaataaatatcttccttttaactgactctccaactaagtcaacagaagcagaaagtccacactctacccagtgagatgccaagtttcaaaaaaggagagaattcttcaagtgtactgtgggtgactttttctcacagtgacaaatgaaaaacctttaaattttcaagtcacgtgctactcaacatttaatgagaacactctgagaaaaacatgagcaagaatgttgaaccatcctaaccccctgcaatggaacttagacacacaaaagcatgtttgcatccctacactgccactggtactcaaaataatgataacagaaaacatcagaaatcatacactagatatccccaaaaagcctgtgctgctgatgttctcactgactgtgtgatagatagaatccattgcttatgtgtcttcatttattttggttgtttctgttgagacagagtctaatatgtagcccaggttgcccttaaaacctggatcctcatgcctcagccgcctgggtcctagaattataagcatgaaacccacaatctggcctgtttctggggtgctgacaactgaattcaaggtcttacatagagcactgtatcactgaactatgtaatccttctgatctgtgtttttcataactcgtatcacttagttgatggaccaaactttaaaaatagaaatgaagtgtgaaaacctagaagaataaaattttgtgattaaaaagtaagtaattcccaataaaattgaaacctacattttataaatttcattcaactatctcaactctaaggtaataggcaaagagtattttcaacttttatacttaggttacctgttttacatcttggacaagatgacgtaaaaacatattagttggtccttgtttctgtgattaaaaaaagaaaaaaaaaagaatcatttcctttgactattgtgtgctggaggcgccttgtttcagaattacacaggtatttcaaattacataggcaaccggaacattggaaagcttcttcagcatctttggtaatgagacttaagctacttaatcttaaagagggagtttcccaggagaagccatgatcagtcaaagtagttttcaaagcatgtatatacagaaatagtaagatgttacttttacgtagtaagaagcacaaaatttgagcacttatgactatcctttatcatatataaattctatcaagtaatcaaatctctttgcatgtgagggcattctatcagtcagtactttgttgaacccttaacaatgcccagcttcctggggatccaagagattcttcacaataacaggaaatgaagagtaatgcatatcctaagacgtggccaacagtgtgaagacgtgtgtgctgaaaggaatccgggagtgctctaaattctagaaagagatcactgttaagtgactggagcaatgatgaagacagaacttggatgatgcttgaagagaggacagtattgaaaggaacatgaaggagaattcaggcagtggacattttcacaatggataagcaggtctcaagggtcaagtttggtcatcagccttggccacagtgcctttacccagtgaggcacctcactgacccaagaagaacatattaatagtggctttaggtcaagatattccaaataactgaataaaaagcaatttttttcttattcacactgttgcctctgtcttaagataaaatattccatggcaagggtgtgagttaacttgaaagtaagtcttcattctgaaaactgtgatggaacatgagcatttgaggaggcagacaaacctgaagctaactagcaaacaaatcttgagcaacatgacatgatactcactgtattatagagatcttccagccggggtatggtgaggaaacggtggaggttcactccattctctatcaagagtttcacaaaatccacccgatccatcactaaagcatctaacattgcttgttctagagtaccgggcttcaggaggtacaaataaggaagaggtacgaagataattaacataagaaaaataagaaacacagataacactacatagataccatcattataaaatacagtcttcctaagaaaccaactgaagacatagtcaactatgattcatgttcttgtgtgagaaaactaaacactgtaaccacctcaaaactcccccaaactgatggtgagtcataaaggtaattctaacgaaaatccaagagtttcctggtttgtttttaatttgtggatggagggaaatgtttactcattcacttggctgatggatttttttttaattttggatttagttttgtttgtggtatcctcattcttccattaaactttacctgcataagtagcatgttggacatactcaactcattttcccctgtcaaacaaatccactaaaactacatcagaagaatttttttaaacaaatcaattcatgagcactggggctggggattagggctgaggacagcagtgtggaatgtgaaaagtggttggtcaagtggtagttggcttcagtccacccaaaaccaaacaattgaaatgagaagtgtcaagggtcacacagattgatgccatgtaacagcaaggccacagtgaagtcaatgtacacatactgagtctaatgttaggacttggaagtcattatccccacttgcccctttactgtgagcagtaacacttgtacctcccagctggtataggcacttcttttctggcattagcatcaatgcaagagaagacatgagtgtgctgacacggaggagagtcccccagaaaatggcatcagatgacctttgctgaagttcaaacacttgagtaaaaaaattcaacacaaatgtatcaaaaagcttggaggagcaaaataattcaggaagaaagcctccaaaaaaaaactactattaatagtttcagacagataaaataagatctattccaggtaccactgaacacagaagaaagaaatccactcagcaaacaaatgtgctcctgggaattggcagactaaccctctgctaccagtaaagcacggttttactgaggctgagttgagaaaccctatcaaacacaaacacaagaaaagcaagagaaacaattatcagcaattgagtaaatactcaggaaacaggaatccgaaaaaggagcagagaaaacaaaggggatagaatggaactgtgaatgcaagtttgaaattatgtacatactgaatctgtagacctgtgatgttttgaatgagaatgtcccacatagagtcatctatctgaatgctgatagaacaactagggagggattaggaggcatggccttgttggaggaggtgtgttgctagaggagcaggctttgaggtttcaaaagacttgcaccacttccagtgtgcctctctgcctcgtgcttgtggttttcacacttgagcttttagctgttgcgctgccaccaagccttcactccatcatcatgaactctgacctgctgaaaccataagccccattaaatattttcttttataagttgccttggtcatgatgttttatcacagtaatagaaaagcaactaaaacaagacctaacacacaccattgtgaaagcttagaactgaagggaccagcttcccttttggcagcaataatggccgaacacgtgcttctatgaccttgtcctagaaaccagaaagtcagatgcctacctcgtgacaaggaaacaatcagaagttagtcactagaaagtcagatgcctgtctcgtgacatggaaccaatcagaagttagctggtggcactatgctttacgaccctgggtgtgctttacggacaagcgcacagcaatgatgtagagagcatagcaaccaccctgggagggcctatggtccataacaaccagttgaccaatcaacacagggcaagccctccaaggctggaggcacaccaatcgtgagcctgtgcgtacccctagacactccccttacgctgccctataagatctttcgggagaccctaggagcagtctttgctagccatccgccatggtgggtggatcaaagaccggagctaacatggggttagctcgttaaactacaataaagcctcatgcaatttgcatcaagctttcgcctctattctgtgtttggggtggcctcggtcctgggctaagattctggaagcctcagctttccaagggtcttacagaaccttagagaaagaaaatattttaaaaattccagggaagaagaaaaaaatggtcgcaaaggacctaaagatggaattgtgttcatttgtcaacaccagtgctagacgttcaaaattctgctgaaaaaaaaaaaatgcaattctagggcaagcaagatggctcatcaggcaatgagccgatgatctgtcctgaaagcatagcaacctgagatggagccatgaaacctatgctaagttgtaaggaaagaattgaccccacaaagctgtcctcaagtctccacttgcatgccatggcttgtgtgccctcccatcccacacactaacaacaacaaactaatagtaacaaaactttaaaaaaaaattctaatcatgaattaaaaaatacagccatatatcaggctctctgaatttttagctcccatgttctttgttaggaagttattaattcttgccatcgttacagaagaagaagactagaaaaggagtcttgaggcacaggaaacagagcagaggggcaagaaaatcccatgctggtgaggcagatgccagaatggcatccaagctccaaaaccagagggcgtctccaacaacacagagtgagcttcagaagatagaaggaccaagaagttcctaggactcatgagttggaagaaatctgtgtggcataatttagaatctagaaagttacaaatatccgaacagccaaaaatgtcaagtgtagaagactcatgtcagtagaaaaaaatcattattttcatagccttctaaccacatttgatgttttaacccatttgttaacttgaacgaaatacaactgaggtatagtttagtgaaatattaatggtgattatcaccattgtaatgctgaaattgaatatatattttcctgccttttcactggtttctattattgatagcagaggataggaaggaacacgtggcatgttaacagtagaaatgagaccaagccaaaggagaccagcagctcacttcggcaaaaggctgtcagctttggttgactcttttgtgggaatggtccaagatttggtgattgtccattaatcagggatactgtttcaaacaatattcttcttaggcacaagcatcctggtcttgtacttggtagactaagagtaaaaggtcatatcctcatcttgcacaacttctttacagggatgaagaactatcggtgcttgagttgaagagaattcaaaagtagaagaaacatagacccattagcaatggtcaagctaacccttcatagtctttgaacaaaacatttttcaaatgatcagcatgtctccatgcagagcagagtctgattcaagactgagtggcaaatggacagatgatgtgaagacaaagataccaagtcctgtctcccacaggagagcaggcagagcacgttcccaagcagagccagcatttttagctaaagtgtttgcaaagtaccctgggcaattgtgatgatagcccacacatcagaagtgtgacctgctgtagactgagattcactctgatgggaggctggcctctgaggtgacaagtctttctgagaacaacttgtagaatgaggtttttccttggtaatgataactctcttcatctttgtttgccttttaattgtatggtcattttagaacacactagttttttatcttgttttagtcacaaggagctcctgtagacatctcagccttgtgatctaatctggtacttcacagcaaagctgatgacagagtgtagggaaggagagcacagagtcagaagacaacactgtgttttcactgggttcagaggttaaaggctcagagtctacttgttttgagtcttctagtggtagtctctacatgtttcactataaatgtcacattttaatttaaaactaaacaaaacactaagttaatatttaagttctaaacaataaaaaacaaaatcaaactcattaaaaataaacataaaatctttctatccattcttttggtcttttaacttcctatttcatcttccatgaaaccagggaaaatttgttttcagggaggcaaaccaaggaaaagacatacctttgcttccctggcatcagagtgatacccatctctcctcaaatcttctctttgttcccctccctaacaaaccaatatgcaaaatacttctttcaaacaacctcattttcattataccttccaatgttgtccataaattaggatatgtttcttggcaatgtccattctgtcccaagccattgccagatttaattgttctgatattgataagtttgtgcctaggagaaaagaaagtaataatcacatattgtattcaagtcaagaaaaaaagcacagaaatcctctagaatgtgagaacaagaagtggggaggaacttcgaatctggtggtcactcacccttcagcaaagccgtgaggattgccaaatcaaggtcttggtgctcctcagactcagcatcaaatatggtaatctgtgatgggtgaaaatcagaaagtcacacggtttacaaactacccagagatgtcttcaaatggtgtaaataagatgaacatctcagctactgaaggaaatattcctggttttgtaaattaaaaacagtgtggcattgtttgacttacaaaagtaaaactgtttcaaatagggtgacaaaaaattagaggcacatagaaaaaaaaaaaacaacactttaaaaatctcacatgtagtagagcttactttgcaccatcatcaggtaaagagcctcattgttgattcccagtgcaaatcaactcacccctcctttggaaggaataaccgtgagagccctctgcaaccctctgatcacttaaaccccaaaactaagacctttgcttcataatgagaggtgactcctcaaatgttcgtcctaaactcagtaagccgatgaccatggagtccctggattgtacaatgaactgcaatcttcacagtgtcaaagtgcccagggcttcctagggtgagactgacttttaaaaactcagcataaaatgtgttagataccattgtgacactttttaaataagtataattttttgtggcttttgttccccccaagtccctatcccttgctactcttgtgtccccctgcccacctaacagattcttttcctctttgatgtcccatgtctcctttggctcacccccacacgcccctacccttcttcatcatctgatataaccatttttgggtctcctttctagatttttccactttacccacatttatatctgtttatgtgtagtatgcatacttccaaatgaaatatatttcctgaaatacaggaagttacattaacagaaaaagccaggaatggcaaggcctggtccaaaggaagactctaactgactcaccttaggaaccttaaagccactgaatgtaagttatgtatccacaaaataaataagaatctggaaaaatgcccaaggtcctattttaaaactgtgctaatgcatctgcatttgttggatccttttgcctaacatccttgtgtgtacaaacaaaatcaaccctcaaccaccagctacacagagcccaatggctgtgatgtgagcactgcagttttcttcctttgcctttcttcatctttctgctcactgctcagtaattatactacttaatgacaaaaagaaacaagtactccagcaatctctttcatgtggccttttcttctaattatgcaaagcatggcagagtggcacctgtgagctcagatcaggcccgccatttcttaattggatgactggacaaatcacttaaattgtctagccttcagctgcataatttccaaaagggaattgagcaaccactgacatcttgaactcattcttagggttattttagatgaaagagagttaaaagcatgtggccacttataaacacagttgtggtcactgaagatgccaaagggtttttcatgtgagttcttgccaggtttgaacttgttccattggttttgtaaggttaggtgctttagtaccaacataatctcttcatgatttcactaagcttcccatttctggagagatcactgcaaatggcaagacttctgcatattcactgaagttttctgcttcatatcatctaagtggtcatcaataaaaattttggaaacagtcccctaaaacacaagcagttttcctgagtctgcattatagttgtagcccttgttttttgtttgtttgtttctttgcttgcttgcttgatttgatttgatttgatttgatttgatttgcttgagacagggtctcactgtgtagctctgggtagcctggaattcaccatgtaaactaggatgcccttgaactcacaaagatccactgccttccagtgcccatgcctgtgcccctgtccatgcccctgcctcctgggtgctggagttaaaggtgtatgccgccatactcagctgaactacattttctattgcatgctttaatctcatttgcccttgtccgttgcacacatgaagacctgctgcgagcctcattcacaatgctatgttgtgatcatcaaacacagcagacttaagtccactgcactcccagggctgctctttcaacctttgcaagtgtttatgtttggtaacttttgtgtgatactgtttttctaagtgctgtgtcccagatagactctaaaatgtaaaacatgaaaggttagagtgggggtggggcaggaggaattcaagtttacacaacggaagggtcaaattttgcaaagtcatatgcatccaagttcaaaataggtattccatgcacttttttttttaaatgtgaaaataaatattttgagttctggaaggtagcacttttttaagtcatcaactcagcatactcacagaatccttgtgtaccatgcactccatcagaatttggaaaaggtgcctcgactgcctaaggctaaagttgaacatgctctgaatcaaacagaagatctcttctttcacctgagggcgcagcatcctggcagagaaataaaggggcataacctgaagcaagccagagaagagaccaaccagtagcactggtgtgagtacggtactccgtatgggtaccctactgagaaggctatcctcaagagagcccatgagcaagaagcaaatgcatagcaggggaagaggggtgcagagaaggatggattttaatgtggagtattcatctgccaggccccctgaaatgatacattctagggtagtctccttaatctgatgggttccagaaggcagtgagttttcacagtccaggcatagtattctcaaacggcctaaccccctaaaatggtaggccattgctcaactaagacaatagcatctctcccggttacaggtcgagggtctggtgcacaagcccagtcattgaaaagaggaatgaccatctaagcatgtggcttgcatggtccatgaaaatgcacagcttgaaagtcccaagtggaagaatgaagagtcaccaagttttcaagctggaagagtcaacaactcaccctccatcctcccaatgtttgtaggtgaaggccaagaggtcagcagctctacccgtgccctcacacaccaccacaggttccttgttcttgacagtctcccatactgtgaggatgacattggggcctccttccaccaccagccccaccacgggcacaccttgtcttgagcctatttcaggtcacaaacaataccatactgtcacaagctgtcctgtctcggtcagtcagccaccttgatttctacacttaaatccttcaactaccacctttacctacctgctcgattagctcaagaccaatcagaaacttggacttgagagaaaatgtagcccaaataaggtgagggcatctttaagcttttgccaggtaaaagatcattaaacgttctcagtaacttaccaggttgtggagggagagcttaaaacgttttaacattttattattgaaaattctaaagaatttaaaagtaagcagatctatacagtagatgccagtgtccccatcactcattaaaaacagtcaggctttgtcagttcaataaacttttaatggtgagaagggcaaccttcaatgtcttttatatttcagtataatacaactttcactgtttaaatttcttatcatgattatgatggggaatgtacttctttgtatgtttatcttgttgattattgaataaaatactgtttggccaatgagacagcaagttagacaggactaggagtcaaagaggattctgggaaatgtagtcgagaagtggtgatccaggcaggaaatgacatagcaaggagactcatatttaagcaaaggaaacaggaagtatcccctttttccccttcgcctcctccagcagcaggatgtgagccaccgacaagagagggtgccaacaaaaggcatcctctataaagataagtcttataacatatatagatttatgataattaagactgagctagcagatgagaagtcctagtcattggccaaggagctttgaatctaatacaagtctctctgtgcattaattggggccctaactcggactggtggctggcgtaaagcgcacatgtggcggtggggctcaatggcttttggcggaaagatttattgtaacatgattatatattatcttatcaaagcaaggagtcaagaaaagctttagcaggctggagagatagctcagaggttaagagcaccaccaactgctcttccagaggtcctgagttcaattcccagcaaccacatggtggctcacaaccatcccttatgagatctgatgctcttttctggtgtgcagatatacatggaagcagaatgctgtatacataaaaaataaataaaatattaaaaaaagaaaagctttagcaactactgagccattcttcaaagccctgttataactatgaatttatatatgtatacagatatttttctataagtgaattgaaatctgagagaatataaataaacaattaacattaaaacatttttggtattttgaaacaagttgtagctatgtagctgcagttggccttaaactcacaatccatttgttttaacctcttgagtgctatattgcaagtatgaactgccatgctcagcatgactttaatcatcttattgatttaaattttaacatgttgcttttaaactatagatttgattttacatttcaaaggaaggaaaactagtgaacaatattttatattcaaccttgagcaactgtccagttctaagaggattttgaatgtgttcctcataaagaagcaagagcaaagtttaacctgatttgagcagaataaaatacactcatggcacctggtgacatgctacaacttttctcttgtgtatcagattaaaaaatattttttgttaagaattaaaaactctaatgcagagaagcctcattagagaactacaggctactgtctgccagtaagtatcaagaagaccatagttctcaaagttaatggttcctgaaacagtcaccttgagaaacaatactgtggagactacactgaaattaccaggagaaagaggggccttgggacctatgcttcctatcctgacaggacaatggctgacaaaacaactgccattgacccctttcaatggccaattactgaggcccggattctttcagcaactctaataggagccatatttcatttattatttgatttttataagtcctttttgctaatatgaaatgccagccagcaacttcaaagacgctttggttattttctagaaataagcaatcagtagttacatattttcattctgtcaaagtagctatacaaatggtaaatatgaatatgtgatcctccgtggacacatcaggtatgacaatcaggcatcaatacataagaacttccatagagccataccaagagggagaagggaacaaagcaacagacatttattaaggatacactgtgcacccaacacttttaaccacatctatcatggtcagtgctagctgtcaactagaaagagtctagaatcccctgggagacagtcctctaggcatgcctgtgggagattatcctggttgcacttatagatgtgggaagacccatcttgaatgtgaacagggctattctctgggaaaagcatcctggactatataaaatgaagaaagcaagctgaacgctaacatgcattcgtttttgtctgcttcctgattgtgaatgtgatgtaaccagtctctttaagcttctgttgccttgactaccccaccatgatggaccatacccttgaactgagagccagaacaaactcttccctcctgaagttagtgctgtcagagtatttcatcacagaagtggtggagggcagggggcggtggcaggggggtggggtgggcgggtaactaaggcaatattgaacacattttttcaaagttttaacaacaaaagttaggggtagacaaatccttacacttatgaagtttaaaagcttagcaagtattgaccccattgcccaagctcacagacagcaaagaattgtccctaatgccacacttactgctgcctcaaaggaacaagaacaaaaactaaaaagacttacttttctagccaccactcaaaggatgcaaagaacttgagtcccttgaaaggtacaaatatagtcgggcgttggtggcgcatgcctttaatcccagcacgagggaggcagaggcaggtggatctctgtgagttcgagaccagcctggtctacaagagctggttccagggcagcctccgaagccacagagaaaccctgtctcaacaaaaaaaaaaaaaagaaaaaaaaaaaaaaagaaaaagaaagaaaagtacagatatcttttggaagacttggttcagtacaactcagggcccatttggagatgccggagtaaaaggcctccatttctccaaaaagcactcagccctcccctttctctaagagttgtctagccagcctgcctagaactcctgttccgaaaataacaccaaacggccatttgttgttgctgttgctgatgcggaagtgaggatggctctttgcagtgctgactcctcgcacatactagacaagcaccctaccacacaattataatgccaaaggattacccacaatctgctacctgtattctcctgccaaaaatggcatgcttacagcactagtgtgggcacagcacaaccttacatacccttatttctgcaggttttaacctgtacccttatttctgattttaaccccttccctgccaatagtcattgggtccacacacatgaaatttatgtcttccttgacaatcagagtttagatggatattcctctcaagttcatctctttatttctctctagctatttccattcacacatagaaacttccctctagctctgtctggccctacattctcttagaggccttgctaaagtttcattcaggatgaaagcttctctgactaccctgccccccaaagacttcttcctctgtgctattgtcaccaacaattctttatcaaccgacaccctgctttcttctttcttttggctcccatgtgttaactggacactctggatgctctgaggtagggacccacttagatctgtccaccctgagcagatggcaagggaagcaccttgttccctaggaagcctctggccagatgctgagccctgatagaacttacagctgtgtatcttctgcatcgagagatgcttctccaggttccgcctgagcttcacctcattgccatacttgcccacagtgccatcatcacacaggatgaagtgagagtgcatgcagttgagtgtggtgagcttgctgagggggttgttattcagagtctggtacatgcacaccacctgagaaacacaaggacaagagggcatcagagctcaaagtccttctccagacttcactgattctaaaccttgtccctgtatgctaacagagcatctatctagattaaaagtattactcactgtccaggactgtatttctcagcaagcttatcttgttttaaaatttcccatttcttatcggtcagataaggttctacatcaatatgcactttacagtatgtgtgaaaaagacaagttgaacaatacccacacataccctaccctattcaacaggataagcactggatcatgggcttagatgtcatggtagtcgtattactaaaatggttctaaatactaattcctctttggtacttaccttgtttctgaccattaaaagacagttcagggatgggaatcatcagtccatagactacaccacgatccaaaatattattctaatatacctcagaaaaacattttgtcactatttttcacatattccaaatgaaataaaggataacaaaaagcagcgtggcttcagggtctttttacatttatggactctccctgaaactgctccacttatttccaagtgtaatctcaggctaattttaactctgagtaatttctgtctccctttttctcgtgtataagtaaggataatgatcattccaatgccataaggtttttgtgagacttcaaagaaataacagactttggactataatattatggataactttataaccccacagcataatgctgaggccagaaaccaaaaccaaagtcactggtaggcttactacatgttttatatttgtagaaagtgatgataaataatacaaaataaaaactgggagaaatgctaaatgctgacaataatgttgcagggctgaattatgatagtgcacaaaaaatgtacagagatactaaacctcataaacaatcagagaatgtatgcaattcagaagaattagctattgttccctgtctatcaaaatggtgatggaggagtacataaaaatgaactctattaaacattattggtaaaaatataaaatttcaccactctctagaaaccagtgtgtcattgtatacaacaactggccccagtgattcctagggaaacaaccaatctagtaccaaagatgtgtatcttaatacaatattaatattattggctgaaattttgagaaacaggaaaccacctaactggacaatcacaaggataattggctcaattacagtaaaacagaatactattagccatgaaaagtcataacccacaaattgaagcctcactaaaaccacaaaatattttgctagagagaaaaaaaaacatatacaatcatattaaaaaagcaaaaaaaaaaagtcatgagagcagatagaatgtttttaaaatactcaggacacagaaaggctctgcttgacaaaaatgatacattttaaacaagaatcgggatgaatagattggaacacatcaaacagcttaaaattcatgagcttaaaacaaaaagtcatctttcacctttgaagaatgataggtgaacatctcaaggctctgaaaacttccaaataaagtatcaggtattattctgtccttcctgtattctcacgtaccatgagattaaacagatgttaatgaaaacgtttctctttacagagtgtctaagctaataagtgtacaaatattgctacaattaaatatcaatcctaacctatgttggttagtttttttgtcaacttgacacaagaaagagtgatctgagaagaggaggcttcagttgaaaaatgcctccatcagattgattttttaaatttgataattgatgtaaaagagctcatccaactgtgtgtggtaccatccctgggcaaatggtcctgtggtgtataagaaagcaaactgagcaaaaggagcaagccagtatgcagcattcctccatggtctctgctttagttcctgtctgatggtggactgtaacctgtaagccaaatatagcatttcctccctaagttgcttttagtcatagtctttatcacagcaataacctaggacataacactgttgaaatatgaatctaggaatgattgccaaaattcataaaatggtagatgtcaaatattacataaaagagttacaactcctctaaggcataaatttgcacccaaaaaaaatctgaatgtgatcacacttgtagatgaaactagcaatcaacaagaaagatgagacaaaaaacatgctaggcctgcttcaataggttaaatctggaaaatccaaactgtgggaaactctttgtggcaaatggctcaatttcttcaacaaattggaggggcaaagaatgaattattagtaggtcaaagaggaaaattaaaaatcagaagatgtactggtctctcacaatatatgaaacattgttggttaataaaatcaaaaaatttttaaactatattgaatttagattttaaagtcattaaagtagaagactgtttaggcagagaaagtatggtaagaggaacagaggacaagagggtaaaggaggacagatataagctaaatacattacttgcattgtgaagatgtcataatgaagtccattactttgtacaatgaatatagactaatcaaaatttttaaactatgaaacaatgaaaaacttgataacattagaaagccaaggttacttatgaattactgttcatttttgggcttgttaatagtgttgtaatgatattttcttaaattgcctgtatatcttagaaatatgttaatataagtcctgaaactctagaataaataagctactagaataaaaaatataggaagaacactttaggataaggtaagaggaaggctttctgcctagatctccagccactcggggaaaaggaccaatgattgacaagtgggacttcatgaaatttagaggtttctatgcaacaaagaagactattaatcaaatgaggaggcagaatacaaaatgggacaaaacttttaccacttacacatcctattgaggattaatatctggaatatggaaagaattcagcaaactaaacatcaaaaaccaaacaacccaatccaatatgagtgaggaactgaacaaggaattttaaaaagaagtactgactaacataaatatttttaaagtgctcaatagccttagccatcagagcaatgcagacgaaaactgctttgagattccacctcacttcatttagaatggctatcatcaagaaaataagtaactacaaatgctagaaaatatatggggaagaggaatcctttttcacttctagtgtgaatgtaacaagggtagtcactatggtaatcaatgtggaagttgttcaaaaaactttctttaaaaatagaactgccatataatccaacaatacaacttctggacatatgcccaaaggattcttatcacacaggtacctacacatctacacgcattgctgctctagtcgcaatatctagaaaatggattcagcctactagccatcaatcgataaaagaataataaaactgccatgtgtgtacataatggacttttattcacctatgaataaaaatgaaatttgtggggaaatagatggatagaaaaacaattatactaactgacgtaacccagacctagaaagacaaacactgcatgttctttttcatttgcagatcctaaactcaaatttttgtgagttttttaaggctgaaaataatgttgtttattgaaatgttgacactaagtccatgttcaaacacataaaatttcagttataaataacaagtcctaagcacttaaatagctcttagtatgaaaaaactgaagaattatttgctgtacttatgctaactaaagaattaagttgttgtggttacctgtgtgttttagttaacaaaccagagacacaaatcattgaagttaaatgtcacattcacagagccatgggaaacaatagagctgtttagggtgtgtgtgtgtgtgtgtgtgtgtgtgtgtgtgtgtgtgtgtgtgtgtgttggtagtagtagtaatattttataaatagtactcagatcacatattaatggtctatttctatatgggatgtccttctctatatatgtttctcttattggttgataaataaaacactgctcggccaatagaggcaggaagataggtgggattaggagatgaggagaattctgggaaaggaaggcagagggcctccatagagccaccaaaggagaaacaggtccagacattctccggtaagtcaagaccacatgaaaatacttagattaatagaaatgggttaattattaagacagagctagctagtaagaagccttagccatcagccaacagtttttagttaatatagtgtccctgtgtttatttggggttaaagtggttgtgggacctgccgggaaagaaactccagcaacactttctgcatgtgatcatactatatttagaaggagtttgagcaaaaacaaaccctgttttaagacaggctttgtcattaattttctataagaccatggatattatatgacatactactaaaagcagggaatctgataagtatgtacaaggtcataaaagcaaatatatcaactttaagcattgtaagagaaagcataaaaataaaagatgttcaactctggcttttatttgtatattgattcaatttgggggggtttctttgtttaatctggagtgaaactctatacaggcaaggaaccaagaaaatggacatgaggtgagcaaggtgtagcaggggatggatacatgaacacatgtgatatgaaagtagaggggggggattctggggtgaaagggttaacctggaattaaggaaggagaatagaaagaggagaggaaacctactactttgtgagttgattaaaaaggggaaatttttaaatacttattttgaagtatttgatatctggaatatgattcaaaataatgaacaccactatttggaaataggtaaaagaataaatgaaacaacattggacaacaaattaatacccgtcaaagctgagaagtggtacacaagaattcatggtttgagactcaacattttttaatgtgggttttccaaaataaaagtcaagataaaccaagaccagcctacagtaactgacatgaaataactgttaaataatcaaacaacaaatatcagattcatagtgtgagatcctggcacgactttttaagaatagacattttgggactgtggcaatgactcacatggtaatggacttgctgcacaagggtggggacctatgttcagatccccagtacccacatcaaaaaccaggcagggtgatatacatcttcaacactagcactgtggggacagatgggtaaattctgagagcttaatgaacagccagcctagccaaacaacaagttctgagttcagcaagtgactctcaaaaataaaggtgaagaacaatagaaagtatttattgttgacctatgacctccacatacatacccatgagcaaatgcacatgtccgcacgtgtacagactcatacaccatacatacaatgagcattttaattctacatatatgcaaatatgtaaccaaattctaaaatgatataccaaatgctgtcaataattatctccttatgtctttttaatgcattatatttttaacgacaaaaacacatgtactttataaataagtttaggcagtcaattccctttcaaaagacaaagatagaaacagacacaggtctggggagatagttcaggtgacaaagaacctatgaggacctgaattcactacccagaatgcacattttttaaaaggtagggctgggagaggtggcacaaaagccaagcatggtggtatatgtgtacatgtttgcatcttctgcactagggagacagaatttgcagatccctggggttcactgactggccagcctagcctactcagtgaggccagtgagagaccctgtctcaaaagaaaggcaatggaggatatagggcaccggagaaacaataccaaggatgtgttctggcttccacacaattctacatacatctgtctgcacacaccacaccacaccacgccacaccacacacacacattcttacatacatacacattctgacacacacatattcttatacacatactcttacacacacacaaagaatcaacatgggaatgaatgaaacaaagcagagtataagctcgaagaaaacaagtagaaagggccaactttacagtgtgatttatactccttgtgaaacacagtaaggctctatacattggctgtaggatagaccaactggctgaaggatagacccccctgaagaatttgacaaaaagaatatcatggtttatttataagaattattctgttgttgcattgagggtagactacaacagaacacaagagtgagagaaaggaagattcttataagcatttgggtgtcagagcatggctgtttggatctgcctcaatgtcagcagaggaaaaaaagaagtcagactctggttatattctgaaggtagagctgagagtttactgacaggtcaggtttgagacataacacaaaagaggtcactctaaacttaacccaggggtttttggtttaggcagttgcaagacagaactggtattttatgagatagggtgacagatgtaataggcaggcaggtgctggtttgggatttattacattcgaggtgtcttatcagctatttgagtacattacagagcaggcagtccagaaacatttcatttccctttgttgtgaaaggtgtgtctactcacatctcttccaaccagttctctctggttctcaatcacaccccaaggagggattccaactgtccagattttcctcaaacacttagaggaatgggcttttagggcatccccaacatgcttggacacacctatgaaacaaccagagtagaagttaaataacagctcacagatcaagctaaacaatgaccctcacagacaaatcgatgatcatatgacatgaaaaatgtcattcctgaggtaggctcctagtatagggaaattggatgccagcttcttgactgtctttttcctctcttaacctctctttctcttaccactggaccaggacctgaataattctcctcttccttgaccaatttctaacacagtcactactcttacctggctggaatgttccatgcactgcttgacatcatgagtgttctagtgttctccaatggaccagtaaaataccctgcagattaactctgatgtaaaggcttgaggttcagagaccactgtatggggaatgggtttttggtttggtttggtttggtttgtctttctccctaacatcaccacagttcctgtgagtgctacagagtagagatttgatagcaggctgtttgactcatggttagatgggggaaggagagatggagggatggggtcgggcatgagctttacctgagtttatgccttctgtaattatccatgctcctgtggtctctgcagctttgaccagaccctggctgaaggtttctttgaggttagaggacatcttgaagttctggatacccccatggacagagatcacaagctttggcagttccatattccactctttcaacattaaatgcaacaggtgatccgattgtgtatcccaagaagttctaatgtactggaaggacagtacacacccatgaagagaacacagtgaaacatgcaagtcagtaaagaaaatgaacacagcctgtgggtggccacagcctagccggaagtattcagggcctctccaaaagtgtaaattcacctaacagaaatattttcttttagaggttccaaactccctccaacttccttctgggaattattaatcactataggtagcttcctctatttggaggtttggtctccatggttcattaagaaggctggaggtgagacaaaaacacttcatcagtaaagccactggcagagagcttcacaaaggagatgaaatatggcttttcataaatgtcatgactttgcatttacttgatccttttcatatatttgtatgctcatgctcaggagcatgagcatctatagtatgttattaatttacctaccaataatttctttgcataccactatccctctgagaaaattcttttgaaaataagtacactgacctctgggagagccactgagtctgatgttacaaggtatgactggctacaggacacttaagttctgcacagtcaggtgagttcgccttcctcagacagaagcccaaccaacagaaggagtaagccacagttatgaaaagaaaggcgggcactagaaaaccatgaattacatacagatctatgccaaaagaaagtatgggtggaactctacatacaagctgatataaattgttgcaatagcctctaaagtgatgacaacaaagtagtttcctattcatctttgaacttgttaatttaggaccacttcatttcacaactaaaatattggaattcctgatcattggtgctgtacagctatcataacacatatataataggaagcatagaaagaaaatcataaatccacatatgagagatgccactgagctgtcaggctttacagcacactacagcagcagggtacaggagatggttttgttgctgagagcagtgggtgagggcaaaggtagaacctgggttccattcacctgccagtggcccaactcttctctcaggtgagcctgtcttcaactctaaaccttccccatactagaagatactgctctttggagaaacatcttcaaagaactaagtcattagcactggcttctccacccaaaggccaactgaacaccactcttctatttcctttgtaaacaactcactcccccagactgaacttaataggcagactctcgggtcctttgtagaatgaggagggggcagggaggactctgggaaggaaactgcagcagagggaaacaaaagacaagctttggtgcagctcaacatgagcctgaaggataaggaagcccaggctgtcctcctctgctgagacatgtagtaaaatgcgctgatacaaaagctgtaatgacagctaaaagctgagtctaaaaccagcgagctattggggctgaagagatggctcagtggttgctgagctgcctgatcttccagaggataaaggttccattcctagggcccagatggagagttacaaccatctgtaactccagttccaggagatctgatgcctttttctcacctccttaggtgccaggcagacatgtggtacacagacatgcatgcagacaaaacatccatacacataaaataaaaacaaatttaaagaaaaaaaaaaaaaacaagctagttgtcaggagatgtgtctagctatattttcaattttcctggctgttctttgacctttgtgcaagccaagcgactggctcattgggcccatccaccttgttcaccttcagatcttagcttaacacatgagcctgtgttctctacttcggaatgcctacctcatggcgccctgtgtcctctcactgagacagaaggggttatctttttcattctctcaaagaacaagtacacttggtatcctccacttttgtgaggagtgtatattaattccctgttgccctccccaaatgccaagcaatgttaatacaaaatccctatcctttttgggccatagggacaatataggcacacaatgagtaatgaatgcacaataaaggtggataataatgaataaaataatatctggaatcatggtacaatagtagagtccttggcttgcacatagaaggtcctgggttctatccccagtactgcaacaaacaaataataactatgagataagacagacatggagcagggaagtgataaagaacacttgctgttcttccagaggactcaaggtcagctcttagcacctacattaagtggcttacaacaacctgtaactctatccccagggcttccaatggcctcttctggcctccaccacatgtgttacagacacacacatacaaataaataacaagtaaataaaaaatgtcttaaaaaaaaaacagcaagccaggtggtagtggcacacacctttaatcccagcacttgggaggcagaagcaggcagatttatgtgagttcaaggccaggctggtctacaaagtaagtttcaggacagctggggctgttacacagagaaaccctgtcttgaaaaaccaaaccaaaccaaaccaaaccaacccaaacaaataaacagcaaaaagagtgtcaagcttgaaggaaaaatagcacacagggctctctaagaatcaggctcagaaagggatcagaaaatgagaggggatttttctgccaactgaaatagaaataagaatgtgtagttaaatgcaagaggatgggtaactgtatgtgtagatttctctagaactgcactgctgctttattgagtctcctgacagtcacctccagagcatgaccggccctcagctttcctgaggctgctccacttgggacatcaggtgctaagaaaacagaactcgattactgctctcagaagatacacctgagggacagttgacctgttaacagtgtatgctaccatttgagtctgccatgtccccagaagcattatactaaaggcctactcaccagcctgtggcattaacaggagatggtagaaactgtagaaggtggggcccaacaggaagaaatgaggtcactgggggtgcaccctgcaagaatagtgtgacccttgtccctattccctgtttcttcctgtctgctgttaagatcaggctgtgccctgtccaaagtcactgcacattgtgcaaaaccaccttgctgcagtctgcaccttgccctgagagttcccactttacaagcattatttgactccactttgcctgaaaatgcagactcggcaccttgttggccacataaacagcaccatctctctggcaccacccacaaggaacagactgataaataaccctaaaatttaaaaaggtgctactctataaatttataaagttaaccaaggccatatgagcacagagctgtattaaagtcattaaagaaaactaattttgagaacttattagagataccatactgaaaagaaaggtataacactctcacctggaccccacaatgcagaaaccacctagcaataaaatgataatggactatactgatgtaccatctggccaccctcagtgtatgcccagggaacaagcagggagcttgtaactgccccaggagctacagctcagatcagtccccactgctataacctacttagatcatcacctgttcacccatctagacctagccctacacctgagatgcagacaatgccccttataccagccagatttgacaatggatcaataatatggatccctttgcaataaagccatgccacatgactctctctccttagaggaatagaagtggggttggctgcaggggagacaaaagagggaggaaggagggtgagagggagaaactatggttgggatgtaaaatgaaatttaaaagaataaatatttttgaaagtaaaaaaaaaagaaaagaaaagaagtacacttggaaggtctcttctgttcaaaactagtgaaatagtttgggttatctgcagaccttggagtggtagacatgttctccatcttggaaattaatggtgccaaaggtatctgtggggcttttcactgtgtgcttctcaacagaccactgctcatttccgttgtcttcagcagctgagaggctccaagcatgatctagcccatggtggtcttgaatcagtcggccacagtaacacctaaatgcagaaaaacagtgactcggaataggagactggtgcaatatttccaatcctcagactggtgtatagatgacatgtaataaataactcttaaaaatttgcattcaggccgggcgtgggtggtgcacgcctttaatcccagcacttgggaggcagtggcaggcagatctctgtgagttcgaggccagcctcgtctacagagcaagttccaggacagattccaaagcaatacagagaaaccctgtctcaggaaaaaaaaaaatcacattcagtccaccagacttggagtaagcacctttacccagtaagccatctcaccagtccctactttgccttcttaaccctgatatccactctgccagccatgtcatgaaagaagatcataagtaagtgggctttatatcttctctctctgttttctgttgtttcatttattcttttggctttttgaaaagatggaaccttaccaggatgctcaggctactcttgaactccaagttctgtatccaaatgatgtttctgccccagcctccaaagtagttagatcacagggcgtcatcagatgtgactctaccttacttaagtaaaagtagctgagagtgagggaaacaaaagcttttctgttgataaatcacttcagagttcttcatcaattctttcccttcactctagaactctttattttattaatagagtactatatattatataatctgtaaataagcatgcatataatgtatatgcatgtgtgtgtatattgggattcataatgcaaaatgtttaatgatgtagtatagaataaagcatgtgaagttcactctttcaaagaaagaaatctttagcatggatcacaatatatgtatactcatttataaacaatattatacgctcatatcagtccacatagtaaatattagtcaagataggaacgaaattacaaatgcatcaaattgttcattgtttttcagttcataattttaaatgactaaggaaaacctgcacatttatcaataaggatgcaaatacattgctaaacacatagctcctttggtaacgtgtttgtctcagtgtgaaagaagccctgggtttgatctccagcaccataaaaatcaggcatggtggtatatgccaataatttcagcactacaaaggtggagaagggagaatcagaagttcaagcttatgattagccacatgacaagtttaaggatagcctaagctacaagagacgctgttttaaaaaggaaggctgtaaggcaagtgtagtggtagccacctacaatttcagctactagtgagactgagatcagagagttagaaatcggcgtccaccttgggcaatttaacaagactgcaagactctgtgtcaatatttaaaaaataaaaaaatcaagtaatataaaagttaaagttaatactgcttaaactcacaaactttagcatatggtcaaaatgaaggaagttttattttgctccactgatggaaaggaaaggtaaacccacttgctgacacatacttcaaaatgtgcatcactgttaaaattcatacagcactacaaagtttactttattgtgcagcgtaggtgttttgcccattttatgcaaatacaacatgtgcaactcatattcaaataccacatggcatacgaagcacagagctacattttatacaaatacagtgtgatagcaaaataaaatgtagtgtttcatacatgttttagatggtaaaagctcttgtcgaatatcccaagatgtttgcatgtctcagaactcaggacttctattagagtccagcaccatgctcaagcaagcaagaaaagaatgaccacacagacacacacacacacacacacacactccttttatacctccatccttttcagaggaaatggcaggtacctcctgggtccattcaacttctcagagtagtctgacacaacatcgtcacacttcaatcaacagagctgtttcctccatccagcccactacaaggatgtccactgtccccctcactattccattggtattcttcacaaagctttgtgttccatggaagaggacaaccttcctggataaaggagactgtccctcaatctaagacttacaaggagttaagctcccctgctagaacctcaaaaaaaaaaaaaaaaaaaaaaaaacctctggagatctgaagaaactctcccaagcactttttgacatgctacctgaaaatgaaaagaagctgatctgacaaaagtctcacctgactaaattctggcagacttggcagccttgagtgcatctgggttaaagaaataaaatcattgttagtttaccaatacatgtggtaagaacttaatgcttatctagtaaatatcattatccacagtctgaaaattggaatttgctaaatattcatgtatcatttacttcccatattatctcctacgtataattatactgcagaaacaatgataaaattaataaaccatgaactatgaaaccaaaatacctagatttgaataccattgattaggtgattcttctaagctgcagctctcacacttaaaaaataacttcaaacactttatgacccctcataaggtgatacaaaggattatcttaactaatatatctgaagtagttcctgccacctggcccattgcaatatatgtaataaaaatacactagttacttttctcacccctgtgacaaaatatctgataaaagcaatctaagaaaagaaggaaggacttgttgtggctcacagtttgaggggatacagtccatcaaggtggtaagtcatgaagatgggagtgtgaggcagctagctgctcacgctgtgtcagcaatcaggcaccagagagagaaacactgttgttcatcctttccccttttattcattctgggaccagcctactggaaatgtaccaaccacgttctgggtgggtctgtcctcctcagttaaactgctctggaaaaactcttgtaaacacacccagaagtgtatctcattaattcaataggtgattcttaatccaggcaagctgatgatggaagctaaccatcataggtacgtattataattactgttgttatcattgttattagaattgctaaacagtactctaggaaatcaagtaataaaacatagtttttaaatattttaaagtcacaaaacagaaccgatgatgtagctccctcagcttgcctagcacaaaagaggccttggattctatccctagtccctcataaactgggtgtggaggcacccacctataattcctacactccagttcaaggtcatgctctgtgacatcctgagttccagtctatcctgagctccaagagacactgcctcagttttgtgtgtgtgtgtgtgtgtgtgtgtgtgtgtgtgtgtgtgtgttcataacactgttttgttggagtatttttttatttgtttgtttggttagtttggttggtttttattggtttagtttggttggtttagttggtctggttagtttaatctggcttgctttgactttgtttggtttaattggcttagtttggtttggtttagtttgttttagttgatttgattagtttagtttggttttgtttgatttgctttgatttatttgtttggcacagtgctaagaatggaatccaaagccttgcacatgctgagctctgccatagagttctggacccagttctcatcactgctgcttagtaatgcatcatgacatctcaaaggcaggttctctatgttttaatcttcttttaaatactgctttacttctcttggttggggagtatgtgaagtcctgtattcgatctctaatatcaacataaggaagaaagagaaagagagagagagagagagagagagagagagagagagagagagagagaagaaaggaaggaaggaaggaaggaaggaaggaaggaaggaaggaagaaaggaaggaaggaaggaaggaagggaagaattaaaattgttttacttttctaaacacatatatccatatgatatttttcaattcccttgaaaaatctttgatgatttttatgagtattttattgaatttgtaaaatgatttaggatttaatatcagtataattattttcctcattagttttcctttttaattttcagaagaatttacaggatttagtcatcaatgatgatattgtcagtgtaaagtagtttttaaaaactgtaattaagcaatagaaataaagacactgttcataaaaaaaaatgatcagtctaagctattcagaacatggcattctaaccactttttcctgttccaacctgtatgtcttttcttaaaagaaagaaggaaaagaagttataatcaagccaattagatttctttctttattaggagctaaaaaagatttaattgaagggagaaatttgtattggtattgaatagtgaaatgctaattttacagttttaatctggtcccacccctaacccaggctaatgttttgcatgtttgatttccatccgcacagtttgtggtgctgtttgaaggtgtacagcctttaggaggtggggcctgactggcagaactatttcatttattggaaggcccttgaaggtaatgacttaccactcattccaaccacagtttctgttttctggtctgaacaatgtaaacaagatcctgccacacacaggagaccaagcgtcctacccaacatgttgtactgagaccttctggagttgaaactcaaaacaagtccctctttcctaacagcttctgtcagctattgtgtcacacggatgaagaagtaacaaatacactactattttcctatccattataatgacaaaaacacataaaagctgtttttcttgagactcttagtagaacccaagaaaatagactatataaaaagaatgcccacagtcatctgttacattatttttgtagtcacaaaaacatagagactgagttttctccataaaaatgtaggaagtcttgaatctttcatagaattatgttcagtggagccaggcatagtggcaagtatctgtagttgcagtacccaggaaactgatgcaggagaatgatggatttaaagccagcccaggatgcatactgataccctatcttagaataaatatatgcccaatggtgttcttttctcagatgcggggggggcggggtttgatggcagagtcctgtgcacactaaatgcatgccctaacactgagtactgttccagatttaacattctccttgcatcctaggactgacaacacttggtattttgtcacttttcctgaggtccaaggtgattttgaagatgactttccatttaaagaagtgaaatgagtttcatgtcacatgacaccataaaagatgaatggaaatataaaataaaaaaaaagtgttaccttggcatcctataaacactttgtaaacaggtaaaatgagaatttccaatcacagggcttaccaaccataggtaattcagtgagggtgggactagtcaatgtttaacaaaggcaaagaacaccattttaatccttgccaaaggaccttaccatgctttccttcataagcatgtactcatgacttctaaactttaaacgaatgtaaggccaatggctcaagggaatctaaaatggactggctaccctaattaaaatatttctctcctatttccctatcaattttccaccagggcaatgacatccggacttaacttcatagacctgattaccctgaggaattttccgtagacctttcttcccctgtttcttaccagctggactttgttcaacaagtagagtttccatagggttgtccagaatgtggagttctctaactcacccctgctgcctacaatctgcataaacacaaagcctcaggaagaaaccacagttaaatctcctgacccctttggatctctgcaatgtccctgacattgggtcctcaacagtcatcatttcccaccaatactttagctggaataaagaatagtcacaacattttgaatattcaatatggaggaagtaaaaatgatttgtcctaacttggtgggttatatagccttatatctctaagacatctgtcctgctaccaaggagaactgcagtgccacatggagtggaatccaccacagtgtgacaagtaagtactgttattatacataagttttccctcttttgagctgctcatttctttaaacagatatttaagaggaacatattggtgataggcactggggctgtctaaggtaactgacagcttagtagattttctacagtactcatggcatgcttttatgtaggacagaaacaaacaacttcaaacaaacaaataccttcacttcatagctggcattaaaccctctacataagtgatagtgctgaatatcttcaaacagcactcaaagtagtattacttctaaaatggaagactgtaatttaagattgtacctgtgagggtcttttgagctgggtatgaatttgttacattctctcttgtagaatactccttcaatccaggatttctgaaacagagaaaaaatattattttatgatctgtcttaatgaaatgagcgtatgttgtaactatataatttaggcaggcaagatatatgtcattatcatggtgttcattaaaataccatgaccaggaactggaaacacagttcactcagtgaagtgtttgcctcacaagcatggggacctgagttcatgtctctaacactcaacataaaagtcagatatggtagcatgcacctacaactgtgctctgggaaggcagagaaaaagagattgctggggcttaccagaaagcaaatctagctcattcagcaatagaggaagacacccaatgtcaatctctggcctcctcatttacaaccacacatgtgtgcattaatatacatacacacatacacacacacacaaacacacacacggggagagagagagagagagagagagagagagagagagagagccaaaaaaaatccaaaacaggctaagcaccttctacagccaaattgttcacacaaaatacaaagtcaattcatgcagaatctcgagtaacaagatcttagtaaagctgtaacttatatgttctcttaaacctgttaagacttacttctataacttgtgccatagacaaataacacatgaatattaggctctccatacttttttaaacaacaaatactatgatttgctgttgacataatagggaagaaaggtgctacagagttgctatttttctctaaagagatcacgggagtatgggaaatgaatcattcaatcagaaaagccaaggctaatcatattaggaagttggagacagtcgcaaaatcttctaatccaaatatagacataactccttcctgcttgaccttaattcaacttaatgaattttttgttagacacctattaaaatagtagagacatagttttctacttaagacaaactgaaaccctgttctattgtcatagatattcaggtataagaatggtattgttctcacaaacactaatggcacagaagtcaagaatatgagaataaaaatgaagaaactgtagatactttggtaaaaagaatgaaaatatccactagattattgattttcaaatatggatcaatgtaattgaaaaattacccactctacataacaacagtgcttaggtatagctagatgacggtgaattgcagtcacaagtacaaaaaggccttatcacttattaaatcccaatgctgctaaggtgttgaaagactggaaagaaagtcaaagaacaggtatcatcttgacaatatctttagacagtctgtaagtacagcttaccattggcaacttcacttcatgatacaaaacctgtatggagaattgagactcactcattcttctaacaaagtgtcttccattctacaaaattcaaatcatagctagcctcctctacaatctgcattagaagtctggaaacgaaagacaaggaactaccatcgaacccaactaactaataagcttggctttgtcatagtataaaaatacttttttatttattcttatttattcattttaagatgttatttttttatgtatgaaagttttttgcctgcactacatgtatgcttagctgctccagaaagtcaaaagatggcatcatatccgcatgttagccgccatgtcggttctgggaaccaaacccaaatcctctgaagataataagtgctcttaccactgagccatctctctagcccccaatatggaaatatgttgataccaaacagcataagattagaagtgtaaagaacacttcagatattcatacaaaatacaatagaatgtgagggaagtaattttattctaaatgcacaaactctaaatccaagtgtttactactgaatacaacacaatatgacagagtccaaatcttaatcagaagagagaggggcagttggatactaatttctgtcccttttgcatagtctacaattatttttatgtattaaaaaatcactcaataaactgtgaaaataaagatcttgaaaaatccaaaatcatggaatttaaaatggacatgagcccatgatgtgtttattatagaaagaaatggcacaatcattaagaataattgagagagggagaagggattggcatatgaagcaagtacaaaatgaatcattgaacccatccctattaaaaacattaacaattttacctagctactctacagacatgttaaatcgctaactttttgtgaaggtgccagcaaaagtgctaccatggcattataatatgtcctcaaagacaccttcactctgaacttcaaaatatttgaatctattaaataattcaaaactcctgcaagaaataagacaagattcctaatgtcaagaaaagtagaaatgaagcgggggggggggggaggagggatagatacaatacctcatatgcacaattgactataaaagagttgcaaataagatacaattattgcttcagttacttcagaagctgaggtagaaggatcaactgatcccagaagtttgatcccagactgggcaacacaagatgctatctccaaatacaagtatataaatgaataaaacaaccagctggtgcaaagaacagccctagttaggagcgtgtgtgtgtgtgtgtgtgtgtgtgtgtgtgtgtgtgtgtgtgtgtgtgtgtgtgtagcctattccttttttcaaagatgtatttattttactttttatgcatatgagtgcttttcctctgtgtatgtaagtgcactgcatgtgtgtctggtgcctccagaagccagaagagggcacaagattccccggggaatggaattatggacagttgtgagtgctgggaaatcaaactcaggttctctgagaggagccagggctctgaactgctgagccccgttcagctactcagcctattcttttcaaagactagataccagctctgtgatcagactttctgaccaaagcactcaatttcttcattcactgcttgctcatgtgcaaaaatgaaaatgatagccaagactagctcatccaggcatgtagcccagtggtagagcatgtgcttagcatgcatggcccaggattcaaccctagcacaaaaatgacagttacaataacactccttcactgagatattggaaagatcttttcatttcttccaaggacttatttggtctctataaagcttagctatcatcattagtcataccaaaggtcaaaagtagtttttgattgttggcatttctgatgtatttttaccacagaacaatgtgagaaaatccaaatctccttcataggactcctcgtgatatgatgtaacggccttatacatccactttctccttaaagtccaggtggtgtgggcccaatgtcacttatgtttctctaggtccccacccaaggattattgaatgaacaacagtgaaaggaacacactcaaggtgctgtggttcctccatagatcaggcactttttctttgtcagtttgtctttggaggaggaaaaggcagagcagaaccagtgttggcctcaatttccttcaccctaagttaaaattagtttttacatcttagacttgaggtaaagatggggaaatacaaagaaatatccagagacggaccttgtaacagccaccatccgtgaatggtcccaactcatggtactggtattttctttacagtgttggtttgaacccacacctcacatgtgctacaaaggggttctaccaccacgccacactcccagaccctatcgattaggagtattttcagacacacattctttctggggaattgctggaaagacagaatcttagaggcatctcttcattttaaacaccaaccattcattttaacaagtaaagggttaagtgactgtggtaaaggaaaatgaaggaaacagattatttcttttcatcccaaaacattttcacaccttcaaaaagctcacaaaaacttctctgacaaagatgcatcagtagataaagccttgcaatagtgaggtccaaagttcaaatccccaggacccacatgaaagtacggtgtgtatggtggctcacctatagtgctagcatgctagaggcagagatagggagtccctggaacaatctatgtagccagccgagtggaatcaatgagctctgagatcaagtgaaagaccctgtctccatctgtaagatagaaagcaatctagatgcccaatgtcaacctccagccaccatatgcacactcacacaatgcacacacacacacacacacacacacacacacacacacacacacacacacacacacacacacgagagagagagagagagagagagagagagagagagagagagagagagagcagagagggaggaagaagggagggagggagagagagatcaagctaattctggtggattctacttaaagaggatgttttagaattcacaatctgtaggaaaccacaagaatggctcacatgaaaccatcataatctcagacttcacagcaacattggatgttttctatgtatgacttctcccttagagaaatccctttattcaaactacgaacctctcagataaaccatctgctggctcagggaaaacaggccactcctttgggagaatcagctctgggaagcattgtgtaagtgttgtgtgaactctgcaaggatgcttactaaagaggaacaatctcagaacaaacagcatccatacccaaaataccaaagaatttattatctgtttcaccaacactaccatgagtatgttgactggatttccattaaatattctttccaggaggcagaatttagtgatacatgcagaaagaaacatagaagtaacttcttcttttttctcttctttgacaataaaggtgagccatttttatgctagtaattttttttgtaacatccctacaatggaatgccagccaattaaccagtgcatcactaaaatgcaatttcttctgtgtaaattaaagatcttcccgagcttgctttgttaggggaaagcattaagaatctcagaatgaatttctaggctacatgaactcatgggcaaatacacagtacatttatgtgcctttcacacagccaaatgatgagttggaggcagcagcagcgacatcctgtatataataaagtcgaaaacggaagtgataccaatccccttcctgtctccttacattctttaaagttctcaagggctcaggattttgaaaacccagtttcaaaatatcagtgaaagataacttctcctcagttgtcacacacacggttgtccagtctcttaaggaataagaaatgcaattgtaaagtcgcacacacctttaatctcagcacttgggagacagacgcaggtggatctcagagagagttcccaggtagccaggaatacacaaaagaaaccctgtgtgtgtgtgggggggttataaatctcttttattagtttttttttttaacatgtgttcctggataattaaatggtagacctttaaagggaatgcaggatatctgttgcataacagctctaacctgttaagaccttcccggcagatgcatataaacctctccgacttccaaggagcaaaatacctccaagatcaaacccagggacctatgcacgatgggccagtggtcagccactgagctacatcctagttcctacagatggcctttgtttatgctccagaaaacataacgaactatccaaaatgttaggaagacaacacccatgcccactacatagtggaagacacactttctggggacaattgactgcattgcttttcatatggctgtgatagatacatgagtaaacaacttggggaggaaaggttagttctgactcatagtttccaaagtgctagcctaccatagagggaaggcagggaaagcaggagcacagaggttcacacaagccaggtggatcagcaaacacagagaactcatgcccaggacatagacagctatgacctccaagacccacccaggtaacccatttctgctagctagctcacatatcccaaaatggtttcagtgacactagtaggatccccagcatcactgggaactaaatgttcagacacatgatctgtggaggacatttttacattcgacatgtaacactgataaaattatatgtttcaataattaactgaaagttaaacttaaaggaaatgtaattttctgatggaatatattaggaatgtcaggctaaatgttattttaattaaatctgcaataatgctttttttcagtattgcatagcaggaagaacataaaagatttggcttcttaaaggttggtgctggacatgatacactgacttgtcagttctgcacacatgagtctgaggcaggaggactaccaagagttccaggccttcctgggctgtacagtgaaaacctgtctcaaatttggggtggggaataaatggtagatacctattctactttattaaaattagacaagttccaaatctcttcaaaaagcagaacatgatggtacatgtttttaaatcccagcagtcaggaagtagagacaggtggatctgagagtttgaggccagcttgttacacagaaagtttcaggacaaccagggctacatagacagaccctgtctctaaataaataaatgtatgtataaacaagcaaacaaacaaacaaaccttcccctaaaacaataagagaaaagagctaggtatggtggcttatgcctataataccggcagtcaaagtctaaatcagaaggctcactgtgagttcaggactagcctgtgctacataattcagttccaggaaagcttgagaaacagattttaaagtgttgatacatctaagtgaaacctccagtgccaggaattgtttacatcttattgagtcactgactaaagaggaccataaaacacccccaaacttcacaggctattgtcaagacaattggtttgctttccataacctgatggaaaagccctattgctgaagatgacacttgtgtccttgaacatggagaagttgagctggtgaagctagaagattcacccctactgactagcattcatggttctggaaggtactatgcatgcaactgaaagaggaagataattaccaatgtctcccagctacaaactgagacataaacagtatatctgcgagatataccaggacaatacatgttatgggtgcaaccaacccacctagataggttatgggcctaggagaaaatgtattactattattcagataaggaacatagcaatcaaatgactcccaatggcattctgctatactcatagattagtatctcactcagccatcatcagagaagcttcttcctcagtagatgggaactaatacagagacccacaactggggcaaggagcagagagttagagaccttgggatactcagtcctaaataggatgtcttcatcacactcctctcagggctcagggaactctgcagaagaggaggcagaaagattgtaagagccatgatgagtgactccaaggaatagcatcttccagacacaacaggacagatacacacatgaactcacagagactgtgacggaacacacaagacttgcacatgcgcacattcaagccagacagggtcccagccttgaggggtgaaagtggggtcctaaccctaaccaagaagctattcgaaattaatacctacctgataactaaggggtaatcagttttctatcctggattgtcacagggaaggccccatgcccaaaaataattggccagcacaaaatgaactcagtgggctttgttttttcttttttgggttttttgttgggtcttttctttttctctcttttttttttttttttttttttgtcttaatggtcttttgagagttctgactctcctctttgaggttttattgggggggttggttttgtttggttatgctttgtggattttttttctttaagaaaaggattatgaagttggatggggaggggagcggaaaggaattggggaaggggaaaataatcgaaacatattatatgaaaaaattaattaaaaaatagagctgggtggtagaggtacacgcctttaatcccagcactccggaggcaggtggatctctgtgagtttgaggtcagcctggtctacaaagctacacagagaaaataaaattaaaaaaaaataaagtacaggcatgaccagtgagctcacctcagtgtatgccaccaagcctgacaatctgagttcagggccccagactcacatagcgaaagaagaggagcatgcacgctatcttctaactactattcatgctttgtggcatgcgcacatgcatacacacataagtaaatacatattataaggttttctaagtgtgggtgatatgtctccattcctcatcagttagtatctcctgttgaagatcgatgtttttcaaatttggggaatttaagatccttcgatactctaaaaactaccaagcatccttgacaagctttattgagttatgtctgctggaattgaccacagtaactagagaacccagaaacattcatgttaggtcttttattaaaaaaaaaaagtgatcacggaggaacagaaaactgtagaaacaaaattcaaattcacctataaaaagacacaggctaacagaatggatatgaagacagaatccatccttctgctgcatacaagaaatacagctcaccttcaaagacagacattacttcagagctaaaggttgggaaaagactttccaatcaaatgatcctaaaaagcaagggtatagctatcctaatatctaacaaattagacttcaaactaaaattaatcaaaagagatgaagaagatcatttcatattcatcaagaaaaaatccatcaagatgaagtctcaattctgaatatctatgcaccaaatacaaaaggcacccacattcctaaaagaaatgttactaaaactcaaatcacacattaaaccccacacacttacagtgggagacttcaacaccccactgtcaccattggacaggactaccagacagaagaaacaaaggaactaacagaagttatgacccaaactgggtttaacagacatctatagaacattctatccacacacaaaagaatatacttttttctcagtgccacatggaatcttctcaaaaatcgaccacatactctgcaataaagcaaacctcaacagatacaaaaaaattggaatagccccttgttatcagaccactatggcttaaaattagaattcaacaacaacacaaattgcagaaaccccacaaactcatggaaactgaacaatgctcagttgcatcacttctgggtaaaggaagaaataaaaaaagaaatcaaagacttcctagaattcaatgaaaatgaaggcacaacatacccaaacctatgggacacactgaaaacagttctaagagaaaagttcatagcactaagtgcccacatgaagaaactggagaagatccacactagagaattaacagaacacctgaaagctctagaacaattagaagcaaactcacccaggaggagtagatgccaggaaataatcaaattgagagctgaaatcaataaagtagaaacaaagaaaacaatacaaagaatcaatgaaacaaagagttggttcttcgagaaaatcaacaagatagacaaacctttatccaaactaaccaaaaggcagagagaacatacaaattaacaaaatcagaaatgaaaatggggacataacaatagacaatggggaaatccagagaatcatcaggtcatacatactttgaaaacctgtactccagaaaattcaaaactttaaaggaaatggacaattatctggatagatatcacttaccaaaattaaatcaaggacagataagcaattttaatagatctataacccctaacaaattagaagcagtcatcataagtcttccaaccaaaaaaagttcagggccagatggtttcaaagcagaattctaccagaaattcaaagaagggctaataccaatactcttcaaattgttccacacaacagaagcagaaggatcattgccaaactctttttacgaggctacaattactttgatacccaaaccacacaaaaacccaactaacatagggaactacaggccaatttccctcatgaacatttgtaacaataagtgtttccactgagccgcccgagccccgctaccacatgggcactttccaccaggcctcccaagttcttcctgctgccacgttaaggtcccaagtaatataagagagacttatattaggtacaaatgctgcttggccagtgactaggatttctcatctgctatttcagccttaattatcataaatctatatattttataagacatatcttattgaggacaccttccactggcaccctctcctgctggtggatcacatggtgactctagagcaaagagcaggaggaagagagagagtgcttccttcttgtccttgcttatgtatgagtctgcctgctatgtcacttccttcctggatctctactacatttcccagaatcctccttggctgctagtcccacctaacttgctgcctcattggccaaacagtatttatcatccaataagacaaacacatacatagaagcacttcccccatcaaacactgatgcaaaaatactcaataaaatactggcaaatcaaatctaagaacacattagaaaaatcatccaccatgatcaagtaggctttatcccagggatgcagggatggttcaacataagaaaatccatcaatgtaatccaccacataaacaaactgaaaaagaaaaaccacctgatcatctcactagatgctgaaaagcctttgacaaaattcaacatccccttatgataaaggtcttggagagatcagggataacaggaacatacctaaacataataaaggcaatatatagcaaaccaacagcctaaaaattcctctaaaatcaggagcaagacaaggctgtctactctctccatatctcttcaatcttgtacttaaagttcttgctagagcaataagacaacaaaaggagatcaagggaatacaaattagaaaggaagaagtcaaactttcactatttgcagatgatatgatagtctacataagtgacccaaagaactctatcagggaactcctacagcttcaacactcctacacttcaacaaagtggcaggatacaagattaactcaaaaaaaatcagtagccctactatatatagacaataaaggggctgagaaagaaatcagagaaacatcaccctttacaatagccacaaacaacataaaatatcttggggtaactctagccaaacaggtgaaagacctgtatgtcaagaactttgagtcattaaagaaagaaattaaagaagatactaaaaattggaaagatctcccatgctcttcgataggtacatcaacatagtaaaaatggcaatctacagattcaatgcaatccctacaattcaaggcaaaggacatagtcaacaagacaaaatggcagcccacagaatgggaaaagatcttcaccaaccccacatctgatagagggctaatctccaaaatttacaatcccagcacaattcttcacagaccttgaaaggaaaactctcaactttatatggaaaatccaaagacccaagatagccaaaacaaccctgtacaataaaggaacttcaggaggaatcactatccctgacttcaaactctactatagagctatagtaatgaaaacagcttggtattggcacaaaaatagacaggtagaccaacgaatggaactgaggaccctgatattaacccacacacctatgatcacctgatctttgacaaagaagctaaaagtatacaatggaaaaaagaaagcaccttcaacaaatggtgctggcataactggatgctggcatgcagaagactgcagatagatccataactatcaccatgcacaaaacttaagtccaaatggatcagagacctcaacataaatccagccacctcttagaagagaaagtgggaagtacccttgaacaaactgatacaggagaccacttcctgaacaaaccaccagtagcacagatactgagattgacaattaataaatgggacctcctgaaactgagaagcttctgtaaggcaaaggacatagtcaacaagacaaaatggcagcccacagaatgggaaaagatcttcaccaaccccacatctgacagagggctaatctccaaaatttacaaagaactcaagaagtttccaaaacaccaaataatccaattaaaaagtggggtacagaactaagtagacaattttcaatagaggaatctaaaacggttgatagacacttaagataagtgctcagcatcctttgccatcagagaaatgcaaatcaaaacaactctgagataccatcttattcctgtcataatggttaaaatcaaaaacactaatgccaatttatgctggagaggatgtggagaaaggtgaacactcctccactgctggtgggagtgccaacttgtacagccactttggaaatcagtatggagattcaggaaaatggaaaccagtctaccacaagatccagcaattccactcttaggcatatacccaaaaaatgctcattcatacaacaatgacatctgttcaactatgttcacagcagcattatttgtaatagccagaacccggaagcaacctagatgcctctcaactgaagactggatagagaaaatatggtacatttacacaaaggagtactactcagcgggaaaaaaacaatggaatctttaaattccaaggcactagaagaaaccatcctgagtgaggtaagccagtcacaaaaagacaaacatgtactcactcatatatggattttagacacggagcaggggtttgccagacaaacactgccagagagtctgggaaacaaggaggactagaagagagacatgcatagtaccccagagaaggggaaggggacaggatctcctgagctaattgggagcatggggggaggggaaagggagctggaagaaaaaggggggagaagaggaggggagaagaggacatgggggagcaggaaggttgggtcggggaagaatagaggacaacaggatgagagataccataatagagggagtcattataggtttgaggagagatatggcactagggagatttccagagatctacaaggatgacaccaactggcaatctaagcaatagtggagaggctaccttaaatgcccttccccaataatgagattgataactgccatatattccatcctagagccttcatcccgtggctgatggaagcagaggcagacacccacagctaaacactgaactgaactcctggaacccaattgcagagagggaggagcaaaggggtcaagactgggctggtgaaacccacagaaacagctgacctgaacaagggagaactcatgaccccagactgacggcttagaggccagcatggaactaatccagaccccctgaatgtgagtgtcagtgaggaggtcttaggtagtagatcagtatttatccctggtgtacaaatggtctttgggagcacattctacgtggagggatgctctttcagctgggacacatgggggagcacctaggtcctgccctggatgatatggggataccccatggagacccttgccttccctggggagcggaggagaaatgtggtgagggttgggggggtggggctggggaggagggtaaggagagggagagggagctgggattggcatgtgaagcaggcttgtttctaatttaaataaaaataaatttaaaaaacaaaaccaaaatccaagtttaaggtacaggataagtgctcagggcctaaagaacagctctagtccacaatgatgacttgacacctgaattcatggccattttcatctcaatgaaaataagtgtgttattacagaagcgggaaatctcagagaaatacttcacaaagtgatcaaaggatgacaggtttgcccatgatgaccagacttgagtgagagagacagctgggtagaaggaggtactcaggggaaaagcaacaatgttgtaaatgacagtcatgtgcacagacacaaatttacacatgcatgtgtgcacacacagtgttcactaagtcaacaatataagcccaaatccagcattaacatagcctttcatatacgccgccaagagctaaatgttttgtttcttagctacaataatatctataatttcatggctaatataatagttactccattatgcagaagaacaggttctatctagaacagttgttctcaatctgtgggtcaccacccctttggaagtcaaataaccctttcacaagggataaatatcagacatcctgcatttcagatatttacattacaatccctaacagtagcacaattacagttgtgaagtaagagtgaaaaggattttatggttgggggtcatcacaacatgaggagctgtattaaaggatcgcagcattgggaaagttgacaaccattggtctaaaaccaagggcagacatcttcgatattatattttatagggaaagtttatgtgaaggaaagtaggacttgtttgtagacaaaggagcagttcgtgaaaaaagataggatggaaccatctcagagagaaggaaagattaaaggaaggagggagagagggacagaatgaagacatgagagcaaaggaaaatgactgtggagatcttggtgagggttggataggggtgtacagaaatggcctggacagtcaggaagatgggctcagaggctggtaagccaggtcagcaggtgacgccacttgatgccaagtctgacaacttgaatccattttgatacctcaaagccccacaagatggaaggagagaatcaactaactgctggatgctgtcctctgacccccatatacacaagcatgcacttgtacacacaaacacacacaaaaaagccataaatgcaatttaatttaaaaaagaaggagaagaagaagaagaagaagaagaagaagaagaagaagaagaagaagaagaagaagaagaagaagaagaattgctcagaatttcagaaactcttcactcccctgagacacaaagagtggctggcaagcttatctttcttgggaattttgttcaagactcgattttccatgttctacaaaatatcacagtcaatttagctctgaaggttgtaaatctgagtgctcacttgtgtcactctcatccagagagagagaaaaaaaaaaaggaacacacaatgaattcaccattccctctcttgctattagcaccatagaattcagtgccatcaccgtgcgttttcacagagtttcctgtgacatgacagctcaccctgcacatggaattttcttataatctctggtaattttattgagaatgacccccatacactcaagtatatggaagctttgttcccagttgtggaactgtttgagaaatatcaggaaatgcagccttgttgcaaaaggcatgtctctagcaggtagatggatctccccctgccacctctttccctctctctctttctctctctctctttctctctctctctttctctctgccttgtgatcatgggtcagatgtaagctctctgctactgctccagcacctgactactgtcaggatccttgccataatagccatggactcatcccctggaagtgtaaaccccaacaaatttcttctataaactggtcccaatgctttgtcacacagtagaaaagtaactaggacataatgaaaagcacccactaaatttgatagattgggaacattcatagcaacctactggacactcccgggggaatacaatcttcctgctacataataaatgggaatttctcttaaaattgagcttaaaagcgtgggcctcaaaattcctgcttatgcagcaacctgcactcaaggaaacgataagacattgtgaggaggaagagatgaaacaagctcactctcttatgtggcccacaggtgactccaaacagaaaacctcagacgcctttttaaaagattatgtattaactgtatgtccggtgagggtggggtgcatgtgcacaggagtgaatgtacccacaaaggccagaagagggcgctgggcccctggagccagtgttacagatggttatgagccacccaaagtgggttcttggagccaagcatgtgtcctgacatagactaaaccaggttctgtcaatttttggcaggggtcttttcttttcctagtgtcaaagattaaacccaagcttcacatatactttaggcaagagctctatttctgaactttatctctaaaacataccttgtaatagataatgctatcaatggtacagaatccacaaaaaatgacagatgccttgtgaaagtgagctgtgcatctcacccctgtactactccagcagccaccagtccccccccccttctttttttggttttttgagatagggtttctctgtattgctttggagcctgtcctggaaccaatgtttggctcagtttccctttccaaagctaagctctgttacacttcaatgaacagtttcccaagatatcctgtgcatttataaatatgtacaaaatttcacattagtatgtatctctgtgcctcgatgttttacattaataatgataataataataatcttacacatttgtttatgggagccaactgatattcatttacacagaaatctttatacaaagcaaataacctactcatgtaaatctattcttcattttgtacaaaatgtctctgaaagcatagctttcaggcacatttatatttatagagtagaaatctaaggaaatgtggatattactacattgttttccatgcagattttcagtttataagtaaaaaccatgagctatatcctagtttatttctctattaaggtgatcaaatactgacctaaaccaacttagggaaggaaaggatttgtctcctcttatatgcttattatgtatattattattattatcatttgaatttccaggcagcagttcatcactggaaaatccagggaagactcaagcaagtcaggaatctggaaacaggggctatagcagacatctgagaggaatgctgctcactggctttctcttcctggttttctcttttttaaacaacctaggaccaccttcctaggggtagcaccactcacagttgtctgggcccttacacatcaatcattaataataataaaaacaacaacaacaaaaaacaccccacagacttgtctacacagaatcaattcctcatatgagattcccccttcctagaggactccagcttgtatcaagctgacagaaacactaaccagtacaaactactagtaactgttaggaaatccgttgttagagaatattgtcaccataatgcatttcaattgcctcggagtgctgccaactctttattatttatggccaactttcttccaaaaggactttgaagtgacaaaattcctcccacttaaaattaatactaacaaatacaataaggaaatggctctctttgctgctagaaaaacaatctccctgcacggccttgaatgtttagaagtctgaaagaatctatagcagcgccctgaaaacatgaaacttctggacaataaatacaacagaagacgtctctaaagagagcaatctgtgctcactgacttccgactacacatcaacagaggtcatggacattgaggctgtagagaagaatggagggcaaagtgcaaagacggcgacctcctattggcgttgatgatagatagtccactcccctgcccacaatttaaccaattgcttacataaaacataccctatctccttatcaggcctgagaaggaatgtaaccgttgtactgggaacttagcctgcccatcatttcccctaccaaaactactgcccctcttgggctccctaagggctcctcactgtacccagtgtccatgttagaaactaggacatccccattttttactgaagttgcaccctgaattaaaaggggggttattttttcttcatccctttcttcttccctattgttgagtgtaactttgctccctcttttcatccggctccaaatctttatgactaactgtggaatgtgttagatgtaccagccacttcccctgtgctctccctattccaggttccagaaagttcccaattaaaagataattgtcagaaaagtacaaagcagtaattactggctgtaatggaagcgggaatcatgttttcttggatacacagtttcaggatactcagtgaccctggactaagacgctcacagtccatgcttcagaactggccacttttcaaaactaatgaacctccctggcacccacctgctgaactctctaatgcattctcacaaatgatactggacaccttctctcacagcaccaagaaagatgaagagctgtgtgccactgaccttccaatatccggcttgttgctcggaaaagctttttcttctcctaccagtctgttaagtcattgggtctctcaaacaagggtagagccagaccttcagtcactgcattactgcccgttcagtcaaccaccaggagtgctggacctatctctaaaatagctcatgtgttgtcaatggctctgcatctgtatcgccactaacctagttaatgcttccacttccctagctacggtggccataaaattttgcgttgattatctcccagaccttcctgcctctagtttgcttttctttggcccaatctctgcaacaaagcctgtagtctttgtagagtgaataagtgagtaagtcagtctcacttgaaaccaccccgtggacccccgttgttttgggggtattagaaacccttcacagtgtgcacaccccactgactgccaaccacatcctgggtattcttctccctgcctcaatctccacattttacatccactgaacaacttacgggccccctagatttacctccaggagctcttttcaggctgttcgcactgtaggctactcgcctctcctttgcttcctagaatgaaatctggatcaaattctccttctgcgggccctctgagcctctgcactcacactatacactgttccgctctgacctacttaaaccctctgtactcggcccacctgccgacatggcagcccccttcgggcctaatgggctgtatgcaagcgcttgccactgctttctatcctgcaaaacaaaggtacatagaagaaaagaaaaggtattgtgaccatataagtgcatgaaaatattgtgaatctctagtggggataggggataatctgctgtcaattccctctgaacatctggccaggggttttcactgaggaggccacaggattgtttccttgggacataatccttgtctaaaccttttttcctttttgtttgttttgtttgtttggttggttggttgtttttcttttcctttttttttttcctttttcttctatcatgttaagattttaaccttaatctttgggtgtcattttaaaatagaaaaataaaaattttcagctcaatttgagacatgaacgtcctctttcattttgttttacttgtggggtttttggtttgttatgttttctaacctttccaccctctccacccttctgtttgcttttgttcagatattggggttaagctcagagcttcttgtatgctgggcttaactctaccactgggctgctggagaccctgagatttcccattaaagtgtgttcagacatgagcacctgaattcaagtatctagaagccacacaaaagctgagggtggaggcctatatctgtaaccccagaactcactagccagtcagtacaggtagatcactgaactccaggttcatgagaaaccctgcctcaaaagataaaggagcgagcaatagaggaagacacctgacattgacctctggctcctatacaactcaccacacacacacacacacacacacatacacacacacacacacatacatacatacatgtgcacacacaaacatgtatatacatacataccaaacacaaaataaatacagtgtctgaaaacctttaatattttaatatcaaatttcccatattcagaataactaattctcctaagattctatgaggaaaaagatgttttgtgaaaaccagggtggtccaggaagtgaaccctcagcagtcggccagtcagtaggagaacaagaatgctgtgactaacagtggttggcaggcatgaagtatttgctaggcccaaatttcccgacttctgtttgttgctgttgctgtggtgttcaaagctccggtgttgttctgtggaggctgactgcacacagggctactcaggaaggaaagagggcaccgcttccacacaatacctccctctaagagtcacccagcagcaccattttcactgggctttaattcttaagatgttccttttttgtttgatttcttgtgacattgtaagatgagaatacaatcaatccataaggaagagactttgattcaaaagggaagtgacaaaagagggattaaacaaaaagaacagcaaactgcctatccccaaacatgttattcagatgttcataacatcttaccattgtattagaaagaggaacatttcactctagcggcccccgagtgtaagcacaaactatacacattaaagtaatttaaaggaacccaccatcattgtctacagtcggagaacagagctgacaaacaggaattccagtccctcctagaagtgctcagacacctgcttcaccacagacctactgaacagagggccccagacaacaacttcacacccctagcacaagggctgtgaagggctccttcagggttcctggtccttcagccaccaaccccgctcttcagctaggtgtttgctaaacctaagtggcagccagcaaaacataacttctgtctgaaatgtctccaagataagagctgcttcggaggaatgctctccctcataccgggagtggctgcaaggaacttgaacaagccaaatatgggcttgtgtagcttgtctctgtgttccctgcaggaataagaatccagtttgcaagtgtcttgtgtcactttgctttgcctgaagctgccctttaaaaccttgctaattttagagagatttttatttgcaaggtttgaccgcaggagtcaaacacatccgtgctctcctgtggttccacccaaatggaaggcggagaaaagagaatcatttaaggacaagaattcaaggacagcctggccaggatatagaaatgttgtctttatttttttttcattaaagatttaaaagctttgctgggcagtggtggcgcacacctttaacaccagcactcaggtgcagaggcaagcagatctctgtgtgttacaaagtgagttccaggacagccataactagaaagagaaaccctgtcttggaaaaaacaaacaaacaaacaaacaaaaatctacacattcaaaactacctccttacttggtcttggggtcaaacaggaaatctggccgcttagaaggcccagttatctaggacagataaggtcaaagactgagatttgttttgttgtatttttcttgggaatccttgtgaagtgcaggctgaccgtaaagacaaaggctggaaaggattaatgaatacaagccaagtgtctgtgaagtgccctcatggacttagattcatctgggaagaaagctgtctctcagagatgattataaggctcagtttataaaacttcttggtccttagatcagtggagggtatctactttctggcaaaagaagaaagaggtctccattttgaaagttcaagccagtttgtaaaggaatattagcagctagcataataagcatttattctgccttctccacacactcacctgcacaatgccaagtacttaatgtgccccagagcacctgagtacaactattatattctgtctatcaatgagatactaaatataaaggagctgactaatgtgcccaagggacccaacagcttgtaaaagtaacagtaggatttacctgttgacaatctgacccagggttcatatgtaggcactctgaccgagcgttcatatttgggcagtctcacttgggacccatatgtccttagcaactaagtgcaccatcccttatctacagaattcattactaataccaagctaagtaagcggtggcatacacttgcacttttcacagtcttggacatgaacttaaagcacttgctctatagaccaggctgctctcgaactcacagagatccacctgcctgtgcctcctgagtgctgggattaaaggtgtgtgccaccaacaccaggctatttgcattttctttaactaggaaatgtaggagggaaaaaatcaggtaatagaaggctggggctgagggcacatagcaagacagaacttcagaaatcagtttactgtggtcttagccacacctgggttccactccatttgtgattttaagtccctcatctattgctttcaatggattccaatggaatctcagacccaaatcacaggcacaactcttagaaagaggtggcctataaatcgtgacttataaatcgtgactgtgtgtttcataggtctagtaactggggtgacttatgagtccaagggacacacagccagaggtaaaaccaaggttctgtccgttacattcttttcttccttgctgaaggcgcttttgcatgctagacaagtgctctgacactgagtttccaccctagagctccttgttctttacttctgctgccggtatctccaaatatttatcattgctatttcttaattcttatttccttctaatggagagaactccatgaaaaggtaacaacacgcattctgaaaacagctagtggttttcagacattatgatctaatcatgggcaaaatgctctgccttgtccccaaattcattgtggtttgcacgggcagcttgagctgcccttccaagccagatgctaacagctcccaacaataaggagggtgaaaagaatgtcaaaattgaatacactctaggcaatgatctgtttctgaggttgcttaatgcatctgctataggaagcacttatttctcaccaagatctttgcttccctggtcagctattctgcttcagtaaaataggaccattcataagaagtcactcgtccataactgggcaagtgaggtaagcactttgaggcactatagtcattcaatgaccgaggctttgagtctggcaaaggaaactccatgtgatgtctacacacagtttaaggatgtggcagaaataaagaactaaattcacaagattaatcctaccatttaaaaccctgtagttagaaagctaggatatcagatgcccatctggctctgggctatttccagaggatctggacccagcactaggcagagaatgacaatgtcttccactagtgacttcaccataatgccaaccattccaggcttgcacaggctacatacccaaggtcagtaggggaaatgtaaccactcatcagaagtcaccttgctgagctttgaattcacttctttcccagtcaaaatggactgtggggaactggactatgactcagtaggcaaattacttgcacagcacaggatctgactgagtttgatccctaagactcacagaagtcagacactggatgcatgctggttatctcaatgctggggaggtagaggctggaagtgtcctgcactcccaaactggccagcatagccagtcaggaaaacaacagatcccagtaggagaccctatctcaaaataaagtggacagccatcctgaggaacaacacctgatgttgacatatggcttccctgtgcatgtctacacagatggactgtaggctgtggcagaaggaactactggccaaaccctaagaaggcatccagcctccaaggcaaattaaatgattgcttctcactgctgagaactgattgtgacactctaaaatagtcttagagttttcctatactatccgggaccaagaacctcttcaacagaaaaacagaaacacaacactcatcaagagtaagggaaagaagtttccatggtggcaggtctgtaatctacaggagacctgtatcaaaagacagtgagaaagagcaagtgttgggctgcccaaatcaaggggaaatgctccattaccacatcctccccactcctacctgagttcagattacacagtcatctccaaactttagaaaaaaatctcattacacagtttatgtgagcatctttctttgatgggatggttgttggattttgctacttaggtctccttgtgtaactgaagttggcctctaactcaatatacatacagcccaggctggcctggattcatgctcctcctgcatctgcctcctaagtgttgggattctaagcatggaacattgtaagtggtctgtttctatttttaattttaataaaagatacatgacatagtgtttactatcctcatttctaagtttgcagttcagtattgacacgtatattcacattgttaggcagccatctctggaactcttctatgctccaaagctgggactctagacctttccctggcaatcaccactcaacatttcatttttatgactctgacattcttaaatgtctcataagtcataagtcttttatgactggttcatatcacttaatataatggccccaatttccaatcatctgctaaaaaatgtcaaaacttccacccttttcaaggctaaaactattctgttgcatgtatgcaagtgtcgcatagtttgtccattcagaaagtctacttccttatctcaatggcatggttctcagggtctgatgtcatacaagctaactgttattactttacagggagagaggtaagggacagatgcttgactgtatgacgtacactccaggaaaggaggaaaaaagaaaacaaactaactatagctgaagctgtactcaatcccatcatgctcatcatcccttctttatcttaatagtaaaagtcttgttcatactacattcccgggttctgagggaggactcatcacatagttggcactccacaaacatgtgttggttgaatgaatctagaagagtggtagtcacagggagaaaatactgtatatatggtcttaatttgagcaagcacaaatatatatatatatggatttttccctagaaactattaacagtgcaatgtatacaatctgaatctttttacacaaatgtacaaatttaaacaatggagatgtgtaaaacacatatgtgtgtttcatgtgtatatgtatgtacttatgtatgtgtgtatgtatgtatatatatatatgtgtgtgtgtcctaaataatttgttccacccatatggttacagcccctcatgggaaataaaaaacagtcaagcaaattctcacaggttaaactcaaatccaattagttaaattagccaatccagataagaagttaatgatatattggctgtggaggaatccaaagcaaagaataaattagtgcatcaaagtcatatgagagcctgagagatggttcaccaagtaaaagtgtataagatcattattgcacaagcctgataactcaagatcaatccccagatcctaaaggggaaggagagaaccaacttctgctctctacatgcacaccatggcaacccacatgataatatatgtgtatgcatatatatatacatttatatatacataggcatatatacacacatttgtgcacacagagacaaaaaactgaagaaggcatttccccttgagcagttaagagttgtatagttctctagaagaaattaaactatcaccatcacatgtatggctagatttttccatgtattccatatcttggcatgacttcaaatctccactctacttttccccctcagcttcattttctccctgaaggaaggaggttgggagaagagtgatagcatttaggacattatgggattattgtcaggatgaggtgcaggcctattagcttagctactagagaggctgagtgaggcaggtggattacaaattcaaggctagtctgggaaacttggtgagttcctgccttgaaataaaaagtatttaaagggttggaaatgtagctcaacggtagagagcttgtatactggaggctgtgggatcaatccccaacacagaaggaaaaaggaaaactcttgtaacttgtcaaatacattattctaaggacacacgacatagcatatcccactaaatcttcaaacagtattttccagttgcttcaaatgcaaaagctgaatctggtaactaagctcgcagggtcacaggtggtgatggagcaaggatgccaattcgggctgcctgagaagacaacagagaacgtgctcctaacaaccaacccagactgaaaagagccaacgcggagcaagcaagaactatgcctgtacacaaccggcacgataaatgttatttctcacaaaaagtgtgaaagtaaagaaaaaccggtagacatgactggcagcttgtgcccccgcagtctgagaggacacccaggcacagcaccgtttcctctaaagcacgggactgggcgctgtcactctccacgacctcgaaacatcccccggagtgacagtggacaggggccaacacagacaacagcaggcccaacttttaccttgacctgcattctcatcgccacaggagccgaagcgacagtggattcttccgggacccggacacctccaggactcggcagacccggactcacgcgcgcgcccgccacccggaccccgagtttggtttccgctcggccacgacccagcactggccgggtcccaactccgggaggaaaggctgcgggtcctgcccttcgggagggtccacgaggttgccaaaacttcagctatgataatcatcttcgggtggagactagaggacttgaaagccagcatttcgcaaatcctacctattctagatcgttgttagatacgtgtgcgcctggctccacccacagccacctggggccccggccctgacccgtgcgtactggagagctctctgccgcaggtcctgctttcatcctagattatccaggccagcaaccaaaaccttgtttgaggactgtggagtcagaaaagcagggccccaccttcacgtgaacactgcctcttacagccttgtcacaatgccttttgggttctgttacctcctgtgtagcaaagagatgactccaaaataagtagtccgaggatcagacgggatgatcactgtattcagacagattttagactcttgggtcagagctgtagatgaggagacagagtttaggttctcagtgtttctcaaacacctgtaagttgctgagcatgacgagacccttctgggattcagtttacttacctacacctagagaataataaagaaaatgcatctttctcacagaggttacacggaacaaagaccttggtttatttatgaagtatcatacaaatgctcttttgtgacttccgttacaggagcaggggcaggggcaggggccgtgggggggggggtccctctgactacacagtcttgtctaaagctgtggtcagtgactccagatgtctctgtgttggaagaggtgacacatgggcgagacacagaggcttgcagatactataatgaacaatactaggcatttatcccggacaggtgactttatattagcgacaccacctgttaagtccagtccaaagttttgcctggtgagctcacatttgcagacacagttaataaaacttcttccttcacttctcgatgcagttttaatggtcatttccttgtttgttagtaaattcatatattggcattttattgttttgtctattaagaaatgagaagcccttccctctcggttcacctcctcaaattgttaatgatctgtagacatttaataggcccagatgctcttatgaggcaagccagagcctcctaacttgtgtcctccatagatcatttctgttagctctcttcggggtgctaaggcctgggaaccagaaatctacagattcacccaaaagactaagcgtttggaatggaacatgctaacacctcttggtgccctgtgactatcatcttctgattcagtctctctgcaatagtgcatttttgggtggccacacatgcttttcagatcaagcttctagaaacatggagcccaaggtgaccctaaatgctttgaccttctgaatggctgctttacaggacactttggttccaagctgtaccaaaagtattggaggcattgtaataagtgtgttaccaaatccagtgctactgcccactgaacagctgaccagtcatgcccaaggtgtgaaggtcaggaaaactggctcagccagagttggaggacatcagtcataaaacccacctttcaggaaagctgacttaggagtatcttataggagctatttgaggacctccacagatatggagtgggaacaagggatatatatcagactggaaggcctagtcacagataaggtcctctgcttgtgagtctccaaaacaaagaccattatttctttgggctattcttgtagcccaattctgactaatgtagttattgcaaaataggcacccaggggctgcctgaagtcctcttgctgttcatcaaactcatgctaattgaagaaagtattatgtgacatgaatcgcccaacagtcctgaggaatgctttcaacgctgggctgcacttggcagatcctcagaccctcccccaggatttctaaggcagagcccaagcatctctttgaattagttgaaaagggtgtctgtaaaatgattctggccacaaacatgtctctatctaggaaggctaggttccacaatgttcatcccttgtatggtgtgggttgattcggaccaacaaatggttccccaagcacagactatttgacagacaatgctggatgcctggagagtcaaaggtgaataagatattgtccagcgttcagagagctcaagtttacaggagggtgaacaatcacaactgaaagcatgcctggggcaccctccacaagcctcagcaacttaaagggcttccttctccagcatggacccacccccagcctctctgtcgtcctctgtccattcttctcttaggttttcttctcctttgtctgatctctccttggatcaccttggaaaacccagggttttccaagcttcaagccttctcatgggcatgtgtgtttgtagagttttgatgtctgacctaacagctcttaaactagggcttcaacactaaaggttaagttagggaattggggtggagttgaacagctggtttgttttcactgggaaggatggtgccccagccatgctttcttttcttaatgagccccaaataaccaagagcattaagggataatttctaatatacatgatcaactctgaaggagtggcaggcttggatttggatttggatttggatttggttttggtttcatttcctttttttggaaggattgttagagagtttccagaggaatacctcccattcttttcaggactaaagggaaatgaatggctctttttctttgtacaaagaagaaaaagtaccatgcatgggagtggtctggcccagttcaatatcatgcctggcttatgattctcactttgagtcaccactcttgctttccgaagcacagagaatataaagaagtacagggccattctgaaaggtaatatactccaactgctacaagcctagctacaatcacaataagcaattgtacaattgggggaaatgtagaattacaggttattaaggcaatcaggataggtatgatgactttacctgtaagccaagcacatcagaggctgaggcaggagagtttctgggtgtttaaagccaggttaggttacagagcaaaaccttatctcaaaaaatattttttaaaagttggacaaaagtcagtaataaaggatggaactcagccctttctgcatagctgtttctggctttagacctttgtcctgcctagttctgtgtcaacttgacagaagctaaactcatctgggaggagtaaacttcaattgagaaaatggccttcataagatcatgttgtgggcaggcaagcctgtagggcattttcttttcttcttttcttttctttcttttttaaatcttttttctgtttacctaaagttttttaattatttcttttttattctatttaaaatgtcttattcatgggcattttcttaattagtgctagataaggaaaggcacagactgttgtgggtagggccatcatgggctggtagtcctggcttctacaagaaagcaggctgacagatagggtcccagcactgaaagagaaactgtacttgaggcctcaaccctaatccaaaacttctccagctgacagccactcaaagggaaatctagtttcttccagtgggatctcattggatgtacaaaccacacttaaggcaggccccatgcccagcagtagatggccaacccaaaatgatctcagtggtatttttggagatgttttatctcataatgctttgccagggttttgttttgttttgttccattccgttttaccttacttgttttttgattattatggtttctgaatttgtgtttttatggtgtgtgtgtgtgtgtgtatgtttctcatgctttttctttttttattctgctttgtcttatactgatggtttattggcctatttgtttcctaaagggagagagaaaaggtttggagttggatgagacagtaatagtggacagtaagtgggggtggtctgagaggaaaaaccatgattaaaatacattgtatgaaaaaaagcttattttcaattaaaaataaaaaagcctgctgagcaagtcacgaggaagaagccttcagcagcactccctcctccacagcctctgtatcagctcctgcctccagctcctttccctgtttgagttcctgccctaactactttcaatgattgatcaatgattgggagcatgagtgaaacaaaccctttcctccccaggttgcctttggtcatagtgtttcatcacaacaatagaaaccctgacaaaaacaaccctcctgctcaaactcaaagtagagactaattccatccattcattctcttaaactgttgcaaacccaaattcttgtagcattgaaacactgtattttttttccacttatagaataacacttacctggtgtgccccagcactgtctaatagccgccaaaaaagaagacttctcctcccacataaacagagactacaatattcttaattggggatgagagattttagcaggctatgcaaggcacatccttttccatcacaattccaatccttggacttcatacttccccaatctaccacagccaggcagggtggtgcacactgatcatcccagcacttgggaagctaaggtagaaatatcatctcaagtgtgagggccagcatttgaattcccaatacccatgtaaatgctagggagttgcggcagcccacatgtaatccctccagagttgagacagggattccctagaagaagatggccagctacactagccaaaaacagcaagctctgcatttgagtgagagtgaaaaagaaggtactgaacatcagcttctgtcctccatatccatatgcacacccacatacgcacaccacacaattttttattttaaaagggagaaaaaattcttcctttctttctttcttttttttttttttttttttgtgctaaggattagaccaaagggccttgcacatgctaggcaaatattctaccactgaactactaattacattttatttgcatatatttattatatgtaaattagaatgttagaatttgtgttaggatacataccaaaatttaaaacaagggaaatttggacacaggaatgtaatgacaggaaacacatgaagggagagggcagcctgagcagactgtccttcatagccttcaaaggcaccaacctcactgacacttgatttcaaatttctagcttccggaaatgcaaggcaatgaaataatgtacactgtcaaggttgccagttacggtgccctaactgattaacacatttccctaccagtacatacttccctaccagttagcattggaagttttcccagctctatctgactaggggagccaaaacccaatatatgcctcttgcacaagcgtagacattatttataccctcctttaccctcaaaggtatctgtttgcaaagccactttaccttgcaggccaacccacaacccttcctgtaagcctttagccacaaggttcttccaatcactttgatgtctctaaatactccagatctcccttggcacaatgacaaacaggatattcatttgaaagctttcaaccagttttgttttgactagttttaagttccgtaaagataggaatttcttctctcactcagcattcacaattctcctgagtaagctgagcccaggatttcaagcatgctaagcaggtacacactgctgctccttagccaacctttacgctttaataaaggaccacacttccttaaaagtaccctctaccagcagggcagtgacagtatatgcctttaatcccagcactagggagccaaagacaggaggatctctgtgagttcgaggtcagcctggtctacagagtgagttccagaacagccagggctggtacacagagaaaaaagaaagaaagaaagaaagaaagaaagaagggagggagggagggaagagagggagggagggagggagggagaagaaaattaccccctctctctttaagtggtatttgaaaatatgtacaacatacgaagtgtgttagctttcattgttatgactaaatgcacaagaagaagaactaagaagcattctagcttatggtggcagagagttcaatccatggtcatttggcctcatgcaatcaaacagaaagaacatcatggtatatggtaaaggaggttctcatctcatccagacaggaaatggaaagtaagcatgacaggaaggacccaggaataatatactcgcccccaagaacccatcctgagtgacctccttccccaaatcaagtcccatcttcccaagtttctagaagctcctaaaatgctgttgctacccagtgaacaaccttgtaatacacgagtaatttttaaggagattcttcatatcaaaatcaatactaagtccagtctgtaggactctccaggaggttttccttaagaagcaaaaagctctaagaacaattaaactgatccatgttaatgtgtattacaatgttgactccagcatgagcacacaagagaaatggaacacactgcctatgtgttggtattaggtgtccctaatacgtttgacaaagttgaagcagcacaataaaattaaaaccaacaaaaggagattgttactgcagacaaagcaagactctgtccagacacaggtggcaaaacatgcttatatgggctgaacactatcaaaaattgcatggcatgcaggtattgtatagccttgttttgtcccacccaggccagcacagacaggactaggaaacctagtcactgctgcgtgagactccagtgggagaagcaaaagccattatcaggatcatcgaaccgatttcaaggtcagagtcacccaggaaagcaaagtcatttcaggaggacactgctcattgctgcctgggtacttgcccttcatccatccctgtcaaggaggatgaacacctgatgacacaagttccactcccattctagagagctgaactgtttgtcagcatttcttaacataaatgaactgaatgattttctccactcgggcagaactctgccagaaggcatatgggcattccactgggggaaacaaggccaagatagcaagagctcttcctgcacatagataacgttcttagttaagttctaaatcacaaaccctcgtgtgtgtgtgtgtgtgtgtgtgtgtgtgtgtgtgtgtgtgtgtgtgtgtgtgtgtgtgtgtgtgtgcaggtatgtgccagacctagaaacctcctcacctttacctcaaaagagtccagggctccacaaatctacctcctttctccaaaacagtgctgagcattctcccaacagttgcacttttttcagcaccgaggatctctgagctttctgccaacaaaagcaatgcaccaatactgtagacaggaggaaatccaaagagcttaggagaaagaaagggtggaaggaagagatcctgggagaatgagttactggcaatttctgactatctaacacaacagagtccccagctaaagtccatctttccccctaactcgcaaacatgtctgcttctttgcggaccgcatcactacggacatgtacataaacaacaaacactctctgtgaaggaattaattacagtgccgtctgcataggtctggagatagaacaagaaacttagggtgccagtctctgcataggaaaatctgttcccagttccataagtcttatttacaaagcagctatcctagtttgctttgctgtgatagtgataatcaccacgaccaaaggcagcttggggagaatagaatataatcgggcttcctgagcatagtccatcactgaggaattcagggcaggagttcaagcaggaacttggagcagagaccaggcgggaacaatgcttactggcttgcttcccgttgcttattcagcttactttcttacactactcaggaccatccgcccagggccgcccacagtgggcggcaccttcctacatcaatcattattcaagaaaatgccccgcagacttcctaaaggctaacctgatagaagggatttttcaactgaggctcgctcttcccagctcactctagtttgtgtcaagttgacaaaaaccaaacagctcaccagctcatgctccttgggggggggggggggtttgacctgtttctaggaggagtttagagcactgaaataaaagaacagaaataatgttagtgtgaagtctgagacagaaggcaacaagttatcgcccagggagcaaagcaagggtcaatttacataggaccgtgtggaatgtttacaagccggaggacccagaaagagactgacttctcagacaggtccagtttaaccagtgtttgccacgttccctcctctctgaactcattgatgaaaactggcctccacattagactgccgctgtaacgctacgaacaactggaaagggtttccacgtggtctaaacgttgatcagctcttttgggtattggtctatagatctcccaacagagaaacctgcaagaaaggtctatgggacctctctctctgctagtttttgtgaatctatgattatttctaaagaaaacagggaaacagctccagaaatttctgcagctctgtcgcctcacatccagaatcaaatcgctttccggccacttttatttcctgtcttttcacatagtttccactctcatcatgcatggtctctctgccacactgcttagtgagcggggtatttccatacatactataaagttacaccatgggcctgccactttaacagcagagacgtgtctcttatgcatcatgactcaaacacacagaaatacatgttactgctactagctgtgtcatacacagagatatctcgacccttccaaagttctctgtgtttttatctctctgcttcattcttaggatactgaacacgtcaagagtcatagaaagtttgcaacaaccactactctggtgactgaaaatgaggaatattaaaggaggtaaagagaaagttaaaacacttgaatttaaaaaaataataatataatataattcagtgcccagaaaacatttactagcccaggattatagtttagaagcttccttaatcctagttattgccttgagcaagttgttatcagagaaaaagcacaaaggttagtcaccactgtgttgttttaacatttgccataaaaaaatatatatccaagagttcattgagagaaatgctgaagaattcacccttctcccaaatgcaaaaggtgagttgatttgattaaattgaaagagaaaaaaggacaagtgtaactcacatgttatgaagaacatgttccttcaaaatcagtgtgcaaaatcccacccatttactgactaaatggagtatgttctcaggacaggtactggcttatttaaactgctgttgacagtttaaagactaccctacccattgtaaggccgaactaggaatttactagttctttcccagcttggcctgttgcaaatagaggaaaaaatataaaatagtgaaataatcaaagagcagaagttgcatatctgctcattttaaaataagacaattttactcacttaatagtttactgtgcctggtgttggtggcgcaaacctttaatcccagcactcgggaggcagaggcaggaggatctctgtgagttcgaggccagtctggtctccagagcgagtgccaggatagacttcaaagctacacagagaaaccctgtttcgaaaaaccaaaaaaataaaaaaataataaaataaaatagtttactgcacttgtgtatattcagaaatgttgtttttgtctttttattatgaaaaatgagatatacagaaagcaatggccctagagaagtgttacgaggtaaacgtacttataactatggcctgttgaagaacaaaatttttgccagaaaccagcagcctctcaggatgtcacatcccaaccatggcaccatttcccactccaagtgacacaacttggcttcactagtacactaataattgtttctgtcagtaacctggcttataatgcccttgcttttttttcatttgtttagtttgtttttaagacagggtaggtctatgtctcctgggctgtcctagaactcactatgtagaccagtctggccttgaactcagaaatccatctgcatctgccttctgattgctgggataaaagccacatcaggctccttgcatttctttatgagatttttagccatgtatacatccctagattctatagttagtttcacccttttttttttttttgtaaaagtggtcttttgtatctcgttttttccaagttgaattttcctattgtattagttatttgtcattaaaaactggtgtaaacattttctgtggacttatctatgtacacaagagtcacattttaaatttaggtttgttcttagacaatttcaaacatgtttatggtgcattctgattactctcagccctactttcccttagcagctcccacccacctttatcaatcgtcagacgccctgcaagtccctgccctgtattcatgtctttttgttttgctggattattatgggtttggaggtattcattggaacttcatggactctccaatgatacacaacttatggcaatgacttcccctctaccagaatctattagtagtcaatagtttcagcagtgagggcatgtatgggcctctctctctctctctctctctctctctctctctctctctctccctttccctgtgtgtttgagagagagagagagagagagagagagagagagagagagagagagagagacccaggtctcagcaaaaagagcagatgacaccagaaaatcaacagtcttaagtctttctagggctcctgactggttcttcaagccagtgacagggaggcaggtgcaggccccagatggggagaaagaagaagctggactgagactgggtgaagggtcagaaccaggatgtctactttttgcgttgtaaatgttgtttgtggcttctttgatttgccttctgttcaggtgtgagggcagcatggaccaaaagtactatacatccattgccacctcagaatcagaactaacatttgctggttgtaaagtgagtattacataccttcatttcattataagcatgtaagaggaaactaacaagagaaagtcaaaagttccttagaaaaatgaaaaaaaattacaaaaaggcaactaaagaagaaactggaatgtcaagatttcaaatcttattagtaaataatcatgccaaggaagacaacaatgaaatgttaattttgtctctgacaagcaaaattaggaagctggcagggctgtgctgtgagtgttgcaatttatgcacactctggacattggttgggagttgggggtccataaacagctaacatttagcaaagtcggatcaaacatatgtatacattctgagatacaacaagccattcttgaataaatagtccagtgatttctcacatttgtcagtgcagagacagaagggggaatgttcattggagcttatagttcgaggagtcagaggtaatactgattgcactaacagatggaaacaaagcatttgtatgaggtatcaatcagaatcaatacatttagaacacagtaatatgtatagatcttaaaatcttgactagttaaaaaagaaagaaagaaagaaagaaacaagactttactattcttagtctttgaaatacattcctcaaagctaagaatacaaattctaatttgcatgcttccctaaggtgtattaagggttttgtctctgcacagtgctgttgggagatggcagagcccacacataacaggtggagcctggtgaaagaaacttaggtcattggagacatccctatgatggcacggtgggaccccagtctgttcttttcttctcttttgcttctaggcatgaagtgaggaggttctgatcaatcatttcttcctgtattttgtcacaagtccaaagaagtgaggtcaaccagccatggcctagaacctccaagactgtgagtcaaaacaaacctctgtttttctaatttgatttcttcaggtgttttgatatgataatgatagtcatgctttcttttgcatatgcctgcaattccagctgaggcagagggagctcaatttggagcgcccgccccccctacatagtaagccctcatttcaaaaacaaacaactgcggggtggggggggtgggggtggaggcacatgcctttaatcccagcacttgggaagcagaggcaggtggatttctgtgagtttcagaccagcctggtctacaagagctagttccagggcagcctccaaagccacagagaagccctgtctcaaaacctcccccaccaaaaaacaacttttaagatacgtttgaattatttcctcttaaatcctgagttgcttgagaacactctagtctctaactactgtctgccttctgatttttttttagcagaattttcatttcaaccttttagcttattcctctgcctcatgaatctatttattcagcaagtacttatgtgtccactcaaatattaactgcacataaatattaaagctattatgatgatttgaatgagaaatatcccccataggctcgagtatttgaacacttggtccccagttggtggccctgtttggggaagctttgggacctttaggaggttagaaccttgatagaggaagtacatcactgtgggtaggcttgcacctcccccacttcctgttctcagcttcaagtttgctaaagatggaatcaatgtctgagcttctcgctctgaccacctcctgccatgcctctctaccattacagactctccctctggaaatgaaagcgaaaataaacgattttttttaatataagttgccttggtcgtggtgttttatcatagcaacagaaaagtaaagatgtgaaggagaagtctgcgagacctgtctcctggaacttgtaaggtaacggtggatgaaaggttcaggcattatgctggcctgcccctgttacctggtggaatccactcaggcaataccctggtcagcccaaggttccatgggaaagaagtctgcacgcaggtgcagaggacctctttaaaagataggcccctgcgcctttacgctctctctctgtctctctctctctccccctgtttctctgtttcccactctctctctctatggcgaccagccatggcggtcagccatttacccctgttcctcttcttagtctccccattctaccgggccttataataaacttatagtcaatatatcagtcttatcagtatttctcttttcttctttttaaacaaaagaataacatgaagagtagccagtgagatagttcatacagtctgagcagcactgattccaaaagtaataagtagatgacaggtacagctaattggatcccaaaacagtaccaagggtatctgtgaggtgggaaaggtctgccaggaggtgtatggttcgttgaccttatataagagtgggcatgccaagaagaaaagactggtggaataacccacaatcctggagcaaaaacctaggcagtagcagcttagcaggcaataagatgaagcagcagtgaataagccatagaatgctggcctccttattcccggccttccccccttctcttattccttccacctctgtagcccactttctatttattcccctggcttctttcactcacccctactgcatgcattgatgaattaaccgttcaccaaagacttcatgcagactgtctggacgggagttactactatcgagtgaatctcctaactctgagtgagagtcacgatttttgcctctataattgctcaggcaaagattagctttttcctgctggatctggaactaaaggaacacattacagttcctggagattctagcagctactttgcaccctcctgaaggaaattcatccaataacaacaacaaaataaaaggatggaggggagatggatggcaggaaaggagagaaaagagagagggggggacagagaaaggaacaaggaagtgagagagaggaagagggagctattttgagccatgcagtctggctatttctcacaccagaagccgattttattttatttacatttttaaattatttgaggattaaaatacttatttattctgtgtgtgtatcttgcacttgtgctcatgcatgcacattcctgcacaccatggcacacatgtgaaggtcagaggacaactcaagaagagtcacttctctccttcctctatgtggaccctggggattgaactctgatcgttattagacttggcagcaaacatctttacctgctgagccatcaaccaggcccaatttagtcttgcaagtacaacataataggtttcttcatgacattttcatacacataagcattatatatgtatacatgtattcattgtacattgtacattgctcgttttctctcttcttccctcctgcttctttctcccccaaataagtcaccttcctgtattatgttttcatttatatattctctctctctctctctctctctctctctctctctctctctctctctctctctgtgtgtgtgtgtgtgtgtgtgtgtgtgtgtcttttaattctggttattttagtcacagtgttctgtcactggccaccagaatgatcccaaacacacataactgcctcctgttttactcagggccaaaaagaaacagccacaaatacagaagccctgcactagagatgaacagcactctttcattcagtagatgagcatcgtgcctgctgtgtcaactgatgcacttgtttactgcattaagaagcatgaaaaacaagaacagcagccacaaaagtgtgtgggatggagcatccccacccagagcaagaggagtcttcacttccccaatcatatccaagtataattctgccgttcaggaaaggaattaaaatattattctgccatgacattttcgagtcgattttaagaaaaaatactgtcttgctgaatagagaaatgcacaaccatgagataataatatttttactagaatggaaattattggtcacttgacatctgacaccagagaatccatacaacttctagcctgctgtttataacaatcaaaatgatgtatgtcgttttcttctcacaaaattatctccagtgtatttactgggtggtcatttatcactataataacatggaaggacatttgctaataagtcagttaactaagcacactgtgtcatcattaataaaagagaattttttttccccaagaaattgaagcaattttgtttgccaaccatgcctccctgtgtagtttgatttcttagttcagacatacgttcgcctaaacaaaatcaaccactaaatgcatttgatttgtgatggcagttccccagcacatgccttgaacatttggtcaagtataaaatctcacataagagaaataaatgcaagcaggagcagtgggagtgttcattgacttaccctcatggttaccatagccagtgtaaacttgactcagtcttcagacactgaatttttccttcagttttcatccaccacataatcagataaagcccagcttgtgagaataaggaaagggtgctgtaaaaaagaactgcccaacacatccccatgcacttaatcaagaaggcagaaatgtaatgctcgctgaataaaaagcattgaactccacttaaagcagagggggtgatttcacttttaacaggaacttgtgactaaggttgtgtggtgggaaaatgattaacattcctgctgacatctgttagagctctccagctgtagacgcctagctgcaggaccttatcaattctgggaatggaagttgtaaattccttatcccactgagcctgctggccccacttgagctcaagtgcccagttattctaagtaaaaatgtgcctgtaaccattgctaacttgatgagtggccatttttattaaagtgtatttctgaaggagcttattcccattccggcttctgggcctcatattaaaagatgaattatcaccttgacccttttctttaaaactccaaaggtttacaagtagcactggcagaatgtctgcgttcctgcagcttgtttgtcttctcaatgacacttgtaagcaagtggccttttgaagtgccagcacttattcctctggagccttgggtcacagacaaaaggaggagggtgaacaataggaacacttaacaacttacaggcattcacaagcccccaaagatctctaagttttctgtctacatggtttgttatgaatagcaatatgaataataacaataggcctgcacaggtgcttctagaagaagaaaagaaatatactcaccccataagagaaatggcagagatttattggatagctgtctatgcagtatctttaacccaggagcccatgaagatgatctgagcacaggcttctctctgcctctcctgcagtgctttaaatagggtaaagcgaaccatgtgaagctggcttaatgtccagtgacagtaaaacctgggtttaaaatttcggtgctgcggaatagcaaaacagctagtcttcagtcgtgtttattgtgttataaacttcacttccctgatagccctgcgactgctctttaggaggagatttgatgactcagagttcttatcattttttttttcttgccaagttagttctacgaatgcaaagacatcttcctaagctcactccaccacaccctgccaagtaaaccaagttttaatgatttcagtgctgttggacatttaaatgaattcatctcactcctttctcttcacctgcgctttcatttcagtagcaaggctcctatgggaccttcaaaagttccataaaggccctgaaacgcagtgggtactcacagatatagctgccattctctccttctttttgcctagctacatttaggtaggaaataggggaaaaatgattacacacacacacacacacacacacacacacaatcacacaatcacacatgtagttagtcattctcacaatgcctgctacactgtaagcacagaacaaaatcactttccatcattagtcagtcctcgaagattgatgtccacaagtgtgtaaaagaattggaaaaaataaacattttcagaacttactttcaactttagcctaaatagaaagcaaataaggagtcttgaaaatacccttgaaattgcacttaaaacatacagttgtgtgactatttccagagacaccattgttacagtttataagatccttaactgaaagggtcaatggcacgcaggaaaagtcaaatccactgctgcagaaaagaactggaaatatggagggctagagagatggctcagcagttaggaacacttgctgctctttcagaggacccaagatcagtccccagaactcaggctgagacactcacaaccttctataattccagctccaagggatccaacaccctctccatgggcatctgtacatacgtggcaaaatccacatagagacacatacataagaataaatcttaaaaaaagaaaaaaacatgtagttgtctgtggtaagcaagtggtatatataaactcacaactgaattacaggtgtcagagaaaggtgatgtcatccccacaaaatggtaaagctcaatatttactattttgagtaacaatgttcacattttcattgcaaacattataagctgaatatcatcagaacagaacacacaccacacagacaggtgatcattgtacatgttcaactgaaccagagtaagctaatgatgaccatattattattattagctgtatacaaaaaggcatgcaagtgtctgaaactcatattgcttttacatagttataactagtttctctcttcttgctttaacttttcataagctgcaataacccagaggtattacttcaagggctgtcatcctccttcagacagaagagttggtgctggaaggccgagaagtcacaaagagatgagatcgtcctaacatcatttggggagacaggaggaataccatctggcctcaagtgggacaaagagggcagaaaagccacattaagattccatcttctaacattcaacagagctgaggatgtatgtggcttggtagtagaaatgcttgccttgcctgtaccttttgtgctacaaaacaaaaataaaattatcttaagctgaaaaacaaaaaagattccagtctttgccgggtggtggtggcacacgcttttaatcccaccactcgggaggcagaggcaggtggatctgtgagttcgagaccagcctggtccacaagagctagttccaggacagcctccaaagccacagagaaaccctgtctcgaaaaaggtgctgaaggcatgacccatacggtgcaccggaagttggtgaaacatcaggagtgactctaagagtatattggggtcctgggtcttccctcttttcctttttgcttcctcaattacaagctgagcaactttgttccaccatggacgtcctgacatgatgttccaccttgccacaaaaaccacaagccaaaatgaatcttttttcctttaagtccatctaccctgggtattttgtcactgtgctgaaaagttgtctgacacagaaaattggcactgagaattggggcttctttctgtgtctgatatactaaaaacacagaataaccatttcctagtattattcagagaaatgggaacgaagaacagaaaaagaaatatttgggaaatatgcaatttgctcaaaatagaagtacattaaaaaaaaatagaagcacgttgaaagttgtacccaaagaggatatagaggctaaagaggtaggtaccactaaacagaaatcaaaggggaatggaggaatggctcagcgggtaagagaatgcactgttactgcagaggaccttagtccattcccagcgcccaggtcaggtggctcatggccacctatatccagctcccggaaagccaacatctctggcctctggggatacctgcacaaatgtgcacataacccactcacagatacacctacacataattaaattaaatgaactaaaaataaaacagctaaataaatcaagtgctttgcaggagagctataggaaagatgctatgagggtatctgagcaatcagaaagaccccacccactcactagctcaaagatgtaaaagtgtgaactcctgaggctggagagatggatgactaagcagttaagaggacttgtgctcttgcagaggatctaagcattgttccctgaatccatgtagtggctcacaactgtacttaaggccaggtccaggggatccaatgctctcttctgatctctatgggcatcctgcatgcaggtatgtgaacccaggcaaaaacacttatacacacaaaacaaaataaatatgttttaaatgcgaactcatttcaatgacttttgtttgaaaaatcctgaggaaccctatttttcagtgccacttagaaaactgtccctgtgtgtacccttatgttcagctgtctgtgactcaggtccgggcagctgaagtttgagcaggcttgagtggtgcagttcatgctagtgaaagaccttagcattgtctacatgttgttggttttataggcaggtaaaatccaggagtttttcagccatggaggaagatatcaaaggaaatcccaagaggccaaatgatatatggctgggctagagactctgaaattggccccatgaaaaaccaatgtgtgaagctataagacaagggtgggacaggtaagctaaaacttcaggaggctacacatgagttgactgctactcaggtaaatgtaatcgattagcagaggaacgtggtttacattgtgcattgtgggagaaagctggaggcagcaatcaaaacagatgtggtttaatgtgtctttgtggtagcaagtttatagcagggaaggaagggtcttctgttcccatggggagctgaagttatactaaatcaacctttctgactctctgtctctctcacacacattctcttgcttcactccttctctcaatatgttctaaagtgaaagtatgcagatcacaaactgttgtttttgtgtggggagagtgaatgaaagaactatattgaaagtgcggtgaaatgaatcaaaggtacttcccctcaagccaaggaacaacactcctgagatgcagtggggaagatacttgcatgttttttgctgtttgccttataatcttgccttttcaacttcaaactgtcctttcttttcttttcttttttttttttttaagatttatttatttatttattatgtatacactgttctttctgcatgtatggctgcatgccagaagagggcatcagatctcattatggatggttgtgagctaccatgtggttgctgggaattgaactcaggaactctgaaagaacagccagtgctcctaacctctgagccatctctccagcccccaaactgtcctttcttaagcaaaatgagatagagattttttttttttttttttttttttttttttttttttttttttagtttttcgagacagggtttctctgtgtagctttggagcctatcctggcactcgctctggagacgaggctggtctcgaactcacagagatccgcctgcctctgtctcccgagtgctgggattaaaggcgtgtgccaccaacacccggctgtttttgttgttgttgttttgttttttgttttgataaagagagatttatgtctggcagatgatagactatgtgtgtatgttcaaattcttggccctcaactctgatgtaagcctctggtgtaggcattttaactaatctaaaagagaggtaaaaatgtaaaacatttatctgggaaatagcactttatttccttcattagagtaaaattgtatataaatttttaataataaatttcatgtcaaataatgtccattaataaaactatttgtttacctctcctctcttagtccataattgtcatttgtccatcacagtgcccatcaaaagggacagggtgggatgttcatctcatgctagtaagcattacttctaagttatattggtgtcatttaaaaataattttttttgtgtccaactcttggcttacaattttacaagttgcttctttttaatagactgaatagtttaattgtgtgtgtgtgtgtgtgtgtgtgtgcatgtatgtgtgtgtattatccttggacattttcatacctatatatattgagtcttgggttatgtttatataccaccataccttcttccatcactccctctctcccactgataatttggaaatttcaagctcatacatagtcccaaaagtatgataaaataatacaaaatctggggggcgggtggcaagggatcaaatgtgtttaacaatgttcatgaattactttaattaaataaaccatagtagattcaaatgcatttgtataattatagataaataacaaatcaaagtattgactggagttgtctctaggaaatggaatttcaatttttcctttaacactttaaatttcctaaataggaatgggcaatttatataatcagaaaaggagtgcacactattaagatgctggtagatttagttctgcatagatagagctcagcaccaggaaaacagttttgtcagagttgacagctgctaccctaacctggaactcagtattcagaagatgcctataaagcagggctggaatgcaactgggcaccgatgaatgatcccacacttttgcacctgcagttttatagttcacattagaaaagctatgttaatgtaagtaaaactattgttttgaaattgtaataagcatcatgcaatagctccacctttcatctggagggtgagccagcatatttgaaagctggtggctggcttaaatactaagctatttatacacagagcagtgtcaacaacttggagattccaaacttattagctcttattagtattcaaaacatgttcaggaccaatcatgactataatatctgtcttggattaaaaagcaaaatgaaatatgcagataaaataaaagcaattagatagtaaaaggataaaagaatggctattaaactcaccttaagacatcaaagaggaatatgcatacttgtgttaatgtgtaatctttttgctttctcagcattttgtagaggacttttatgcttatgcttgtgagagaagtttgtctagttttgaaatcagagtgataatggccttgcaaaatgaactgaaaagtgtttctccatgttccatttttccaaaggaaattgtgttatttctaccttaaatgactggaagagttttccagtaaaattctatgacttcagagttctactgttggaaggtttcaagcaatggattcagtttctttgacagacatgagactgctaaggctacttatttattcatgaagatgccattgtaatttatgcctataaacaactttatccactttatctatgtcctcaaaataaagttgtatgtaatatcacccctgaccccgtgtttctttggtatcgaacccagggactcgtcacacacattcagcaagcactctacaactgagctacatccccagctcaatgactcctagggcttcagtgacatattctgagtttctatattgcaccatgagctgctgaggtctgaggttctgttcctgttgtagtaacctcctttcttcttgtttttgagctgtgatcatctcttttgatgcaccatcaagttcactggctccttcctcccatctttgttctgtttagcaaatctgccaattctctattttttttaatcactaaatgtaataattatggactgcaggtgtggctcagttgttaggcccttgcctggcatacatgtttaattcccagcaccacataaaccaggtgtggcgtcacacacctgtaatcctagtatggaggtggaggcaggaggatcagaagttcaaggttattttcacccaccaaaggatcccatctacactagaatcagattagatctagagatctcaatttgaacaaactcaaggtgaaccaaaggccttaatttacatgaaatgctgaaactgcttgggggttagcatagggacaacactcaaatgtaggtatagacaacactttctagatagaattccaacatcagagagagcagcatcaagaattaacaggcgggattatatgacagtaaaaagcttctgcaaagcaaaaatttcaatagggtgaagagatgagctacacaatggaaactttgtcagttacacttcagacaaggagctaattaatatccagtatacaaagaactctttctctctctttcacacactgccaactaataaatgtgctaatgaactgaacagagtccttaaaagaaacacaaggaccaaaaagtacttttaagagtttaatgtctctggctggcagagaaatggaaattgaaactgattacatctcaccccagtcaaaatggctatcaagaaaacagatgccaaactgggtagttccaggacagccagggatacacaaagactggcgggggatggggcgggagggtgaaaaacagatgtgggtaaagaggaatccttattgtttgtgggagtgtaaactagtacagacactatgtcattgtgaaatcctcaaaataaataaataatccctaaactaaaaaatagaactactatatgacccaactataccatttctggacatgtatgcaaaggactttgtagcctactagaggtgtgtgcacatttgtgcttattcctgctctaatcacaacaggagtaaatggaaatcagcctccatgtctatcagcaaagaaaatgtggtacctgtaataaaattgtattcaacccaaacgaagaagttgcaggaaaatgtataaagtggaaagtactaagtgaggtaaccaagttcagaaaaacaaataccaaatgttccctcttaaagtagatctgcttctaacttacacacatatgtgtgaggggttgagcatgggcatgtgtcatgaccagacaggtgtctgtgatgctgttgtcaacttgacaagatctatagtcacctgggagaaattattttaatcctaattgagatgggaggtcttgaaatcgtggatggaacctttctttgggctggaatcctggaccatataaaaaggtaaacctgataacccgaatttggtccctgggaacatagagtggagaggacccactctcaaactgttcactgaccatcaatcacacagtgacacagaggtccacatgcatacacaaataaacacttaattttaaaagttaacttagaatactgcctcctgcttaacagtggatgcagtgagaccagctccctcaggctctcgctgctgggacttccacatggtgaactatagcctcaacatagagctagagtaaaccttctctgcccaaagatccttgtcagagcattttatcacaacaacaggaaaagaaactaagataaggcccccaggaggtagaaaaggtttaaggaaggagtgtgagaaggctgaaagaacagtgacatgcagagagagccctagggacaggaaagcatcagggaaacctggggaggcagatgttggtggagagcagccacagcaatagtgtgtatggaaatgccacacatgctaattaaaacataattttttaaaaagtagtcactctgaggtagatactatttattatttctcattttcctctcattgacatggggtatctcttcagaattttgaattggattttaggtcaaaaatacaaacaaacgaattattcagtaacaaagccaacattttggatgcaatacacaaattagtcactgatacataactcaagcataaacagtgtactttattaacaataaaattgtaacacaataacttagtagtgacagatccaataatgtaacaaattaattaacaggcattgtttcagctcacactagtgatctcctttaaacaggaagattactagtctagtggttctggcgggtctgcgcagtacaggaatacagacttggtgccagaaacaaaataaaataaaacaaaacaaaacaacaacaacaaaaaaccaaactgtgtaaagcccaccttccaataactgagtgaaatctctaggatggggctcaagcagactggtaaagtgctatcagtgttgagaactgcaggtctaaactaatcaacaagaacaaaactgtgctcaaaccaaaaatcaatatactgaccatatcctttctttttatctcagaaaaggggaggagggacaggcatctacttcttactgttctttatacagcttttggctgcatccattgccgatagcattttaataaacagcaaatactgaaggttaaaaactaattacccaaatggaaagtctcattaatttaaatttacactcttttaaaacaatattagctttaagaaacaatctcatattttaattttgcatagatactcaagtctatttgttcaaccaagaggagccaataaaatgtactagaaagtattttcttagcatcagtcatataaatgaattcattcggagtaccacagataagctttctggtgcagagggacattggccagagcacgaatgaaagagctgagtgcttcctctaaagctgccaacacccccttttccaagataagcaccttccaagttagagcatgaacaaaaaaatctattcattaaaaatgcatccacaaagtattttgcccccagctatactatatccttaacaaaaatctccattaggatattcagtagtaattacaagttatttagcctcaaaactcttcctcatttttcaggtttgataacagtatcatgtcaagtatggaaaataacatttcctttagttgtctcaaattcaaagaatcctgcttcttcagctcctcctgtcagggctccatgtcaatttcaactacttcattcttgtcctgaagtgtttctgtcaggccatccgcatttgcacacaagtcttcaagagctgctagatcaataggtggcagagggttcctccagtactggaatgtattatactgccaaaactcttcactgggctttaagggaaggagaaagataaaaatgggtcaccagcttagaaaacaacataaacaacgtctctctctctctctctctctctctctcacacacacacacacattcattcatagtctctctctctctctctctctctctctgaaataatggctgtctttcagtctggcagggaatggaagagctgtaaacttaagggcatcctggactaccctttctcaaaaacagaaagataactatgtattttttgttgttgttgtttacaccgatttaggggtagcacatattatgattgagatcagaggacaactttcaggagacagtactcccttccaccatgtgagttccaggaactgaactcaagtcgcaggcttggcaaaagtgccttacctgctaagacatcttgccagcccaataactactttttaaattcctagtttgaaaaatatactcaaatatagtttacatactttttcattttcaacaaatagttttgattttgaataaagtattccacatacccaatcaaatctgtggtttgtatttgctaatagtttaattttaaaagaatttccttcaattatcattatcacctatattttcaaaaatattataatgctttaaaatttgtatttatgtgtatggcattttgtccaaacatatgtctgtgtactgtggcatgtagtgcctaagaaagccagaagaaggcatcaagtcccctgagactggagttacagactgttgtcagccaccatgtgggtttggggaattgtaccgtggtcctctggaaaaagagccagggttaagtttcaatgagaaatatgagatttaaaatacatatacacctttatgacctactttggtttttttccctgaagtttagtattgagactaacatagagatcaaaatatttcatgaagtcctataaagtttaggataggaaactgataaagagaagaacacagggggctggagagatgactcagtggttaagaatattagctggtcttccagaggtcctgagttcaattcccaacaaccacatacatgatggctcacaaccatctgtaatgagatctggtgccctcttctggcctgcagggatacatgcagacagaacactgtattcataataaataaataaatctttaaaaaaaaaagagagagagaacataaacttaacaatgggcatgactgataaatagttctaccaagcaaaaagagggttgatcccttaaacattaagctgtttaccctaaatgattacaaaattactttaagtagtaaagttaaaattggcatgacatcctcaaaatactccatgcaaagagagcagcactagagtcccacccaggctttgaggtgacaattctcaacctgaatacccttttcagatcaatgccttactacatccactgtattaaatttacacttgctacagcaactccatccatggggaatgacaatcacacaaacttactgctccaataacacagaaataaaaacaaatgaaaataactttagtgagatattcaaccccatgcacctgtatcgctgaatatgcctgtttgggtgtggtcacaggtttggacttgaccagttaaaaggattgaactgggtatcggaaagcccctccttcaggtcttggagagtatccaggtggcagggtctgactgaattggagtatttgaggaatttcctgtgtaaattattttctcctaagaaactccacttcatcatactggtcaagcacccaataattaacttggatcttatttaacccaatgtaatgaaaatattgtttgaatatgtgctcaacatttcaaaacaatggcataatacactcttttcaaaactaagaatgtaccttacacttctagtactattgctgtgcagtggctacacaacacagcaatgctcaggggctatgtgacagagtggagagcagtgtaagcagtcatcctcttaggctttaaggcagatagagttagccttttgggaattttctaatattgggctaaagatacaataaagtcaaaaaacatagggctggttcgatggctcagcagataaccaaatgcatgtgtgttacacatgaaaaacttttaaaggatgtatcacaaaaaatccactttaataataagcaaatggggtcaaaatagttaccttctagttccctccttatgagtacagagcaaaatataacctagtgactgaaaacaaactgccaccaggtatacctttgactaaccatgacaaaaatctctgatcttacctcattagaaacatggattaggatctttgtaagaattaaaattagcataggaaatactacggctgggtataacatatcctcaaatgaatgtatcagtaactctctccctaatataacattcctgctgttactgggcaacacgatacaatattggctaagcaactgatctgcataaaattatactattaaagattatcttacatatgacacatatgcactcttggctttgtcttaattatacaaatacattaaactatcccctctctatatatacagagtgtacatacactcgtacatatggatgtgtgtatatgaaacaatacaggacacattctgaagcttgacaacacaaagtagatactatgcctggaaagaaggcatctgtggtagtgttttctaaatgagactatgaggttagggcaagcatttaagtcctaatctgagcaaacagaaatcagaccgacactgatgtcagtatgccttttgttatatctttttttcctggatgacaagctcttaaagcaaaaccttgtctttggaggcaagagagagggagagtttttatcttctcattgttctgcggaagggaaggaactctaacccccatcagtcatgcacacacagatagactgcacctacaatgcacacagtgtattctggtagcaaagaaaatctgcatatggacagcttgccaatgatggtctggagaggaagatttcaccctaggcagcatgggtcttgatccaatagtggtggatgattatgattctgttttaaggaagctggtttagaacttctactagcaatctaccgagagtctaaataaggtccgtgttaaattatacagttagataacctctccctacgcttgtaactccagcactcggaggcagagacaggcagatctctgagttagaggccagcatggtccagggcagccaaggttacacagagaaaccctgtctggaaaaaacaaaacaaaaaagaaaatctctcacaactccggtgtgtttgtgtgtagggggttggggggggtgggggggaggggtagtgccgagttcccaactaaaaaaattctgttatcagatttctcacgaaaaacaatggcaaaacaatctcaattatctattcatttttggcatgattgctaactttgtcataatatgcttaagacactagagaaaggcattgggcagatgcatcccaagatggttgaggagggttttcggagttcagagaattacacttgccaaccacctcaacccccaccaatttataccagaactgctttaaagaaggctcgggagtctctaagtcaggccaagcctgtgcggtacatataaaatgtgggttatatgttcatttgaagttttccagtcacattttacaaagtaaaattaacatttcattccagcagatacgtgacaaattacttcgcgtgtaacacagcacaggacctgagccttttttctttctttttttcctttcgattcttcagagggggtttccctgtgtagcccctgaatgtcctggaactcgctctgtagacaagcttggcctcgaactcaagagatctgactgcctcagcctcccgagtttgggattaaaggcgtgcgccaccgccgccgggcaactctgagctcttatcttaaccaaattttaagggcctactcgtttacactaacaacacatacatttggatacgctgcatttttctagtgtttttctggatcacatggctagcagacagcgtagagcaaagtgattcccaacgatcctttctcataggccttgaaccttatgagttaacgggtcctcttaagacccgacggcagcccttcccttctgccagaccggcaccaggctcaattaactgatggatgctgctggaaaaccgactgcaggttctacaacacttgccgttaaaccaaacatttccctctcgtttgcatcgagctgacctcctccgggccacgggtccagcccctcgagtgggcgggccggacttgcgcagcccgggacgcggctctgggcttgagcggggcggacctacctggatgggcgccccgtcggctccccgcgggctgtccgcactccccaccgcgtcgccgccgcccggagctcggccgacccgggtttcctcctgctcgccgggaggtggctctccgggctccaggccgaggccctctcgctcctggccgccgtccccgcagcctcgtcgcttgcggggagcaggcgcaggctccgccatgatccccgcgtccccctggcgtttgcgggaccgagccgccccagacggcgggacccagagcggcggctcctcggggaagtcgctgagcaagagccgcttccaaggcacgcggaacgtgagcggctcagccgcacgccgcttggccatgggccggggatgggcggcacgcgggtgccagcgggcgggcggagagcagcgcggagctgcgggctagggcgccccgagggcggcagggacgttggggagtcccagcgaggcgcccgagattcgaacctgcgccgcgatgcgcgcgcagtcgcgccggtccgacgcggccgctggttggtggaggctcctggcttgcgttcccgagtgcccttgcggccggaagtgtgcacctcgaggaggcggggcgtggaggggatgtggctggtaggatgcggggaaccaccacctctgcttccagaagctgtcggccccctgtgcacctgccctgttgttcgctttcccccgtgcgctttcctgtctgcaaacggtcccggaggcgaggacacgggcgtggtggccgggagacccggcgctctcggaagtcctggcgggaagcgcgctggctgcggccctttcacttttcattgtgaatgtagtgcggccgagaggtgactgcttagcccaaagccctgctcaccctgcagtagtcctgcccgccggattccaagaccttctttccagctgctggtatctggcgtagagaaatgcaagccctgatggatttgcttcaacctgtactttagtcgttggataaaagcagttactaggggctggggccataactgagtgatagagtgcttgcctactatgacccaaggccggaggtttagtccctaatgttataaagaagaggaaaaggaaaagaagcagtaaccaaacaaaactaaagaaaaaaaaaaaaataaggccatcagtactccaaagaagcaatcttgtagagcaaaaacaaaaagcttgcaaggaagttaattccgttttagctataggtagtgagaatattaactactttaaaagaagaaaatgtgtttgggtatatttgtgtgtgtgtaacaaatgtatgcttgaccacttgtatttagaggtatactctagaaggttgtgggaggacagcaagttttaacaagcacagacagtagtttatcgggaagtttactatagctcttctgtttgatctctccagttcctgtttggagttgataattcttccacctggaacataggaaaagcttgcctttttcaaactagtgacacagaccagacaagaaaggacttagtccttcagatgatttgttctgcgtagaccctactgtaaaaccatagaatacagcgtgggcagtggctcgtgcctggccccctaattgtgagacttagcatatgtacacaagcacgaacatgcctgaaataggcataaaaacattcgagttgactaacccagtttcagaaacagcacagtgccagaagggctaaagagcatcttgtatgcctccctactggcaccaccttctcttctctgtgcccaagtagtcttgtttcagacgttgagttatttattacttctttgtaatttcccaactagccactcgcccaaatatatatatatttgtaaaaatgtttttggtttcgctgatattttaagatttacttagatctaactgacagacaataaactgcttatatttcagacatgacgttttgccatcacatacgcatgacacacgtgatagtacaaatatccaccaccgtaaaaatcctttatatagtgcctttctgtaatctctccctcatgacccccttcatgtcccctaagtgtcagatttgctttctatcatctatactaccatgcattttctccattttatataaatggattaatacaatatatacttttatttgcctttttttcccttggcataagtattttgagatccttccatgttatgtgttttttattttttattggcaagtagtattccactgcatgagaatgtttattcatttgttaatgggctaattatttttcaatgaaagttattatgtgtaaagctgttaagaacattggtcaaaaagactttgtatagacaaaggctaattttacaaagtattttcctcagtttaaagtttgttaaatttttttttggcatcggaaggctattattattttcttttctttacatcctcaccagcaaacattatggtctgacctggtcgatgtgaaattgatctcctgtggcctcaatttgcatcgtagtgaagttgaacatccactacctctgcctcaaaacctaccttgaactctagtacctacttggcccagtttggatggctagacattggttaaaggtgtattgcatctttagccccttttaaaaactagactgggtgtcctttgtttctggtttgcaagaacccttttatttagtactctagaaaatgtctccaatggtaataattggtgttagaaataccaacttctgccaatttgtgtcttatattttcattgtatggagtattacttctaacttatttttgaaacaaggtttcaataagtatccctggttggtcttgagctctctaaatagagcagactggactcaaactcagaaatccacctggctctgccccctgtgaactgggattaaaggtgtgtattaccaggtccaacctttatttttatgttgcattcattacatttattgtgttagtacatgtcacaacacacacctggtggtcagagaacaacttgtgaaagtcagttctctccttccatcttgtgggccccagggatcaaactcagatggtcaggactagcggccagctccttaacccatggagccatcttgttgggcctgccatggcttaattctaacatagcaaaataaatctaccatgtctgttttagtttgtacattatgttttttctaaacattttgcattttcttttctttccacacttgtcttttcattcacttggagtcaatggtgtgtgtgtgtgtgtgtgtgtatgctgaggagtcagttcattctgttcccatgacagttgtcattgctcactgttgtatgattcctactccatgctaactccattccttactaaacttacagggttgggcactctattaagctcaactattctgtttgcagttgtgtctcaactgcagctttataggcaggtttgacagggccaacaagatggcttaatgcataaaagtgcttacttccaagcctaaacctgagttcaatccctgtgaccccatatggaggaaagacagaactgacttcagcagggtgttctctgatccatgccatgtgtgcaagtttatgtgcacacacttgtgcacacacaaacatgcacacactaaatattgttgtgtttattaggagatttgacagctataaagcaattgcttgcaggacacttagcccctgactcttccgtatgaaatcacctatagcatttccctttgttgttttcattggtctgttgttttcattgttctcgaggtttgaaatgcttttgaatttttttttctttttcctgacttctattaaataacaaggatatctttaatttcatttctgtttaaccgcttggcactttagctattcctctttccattactattcaatggttcctctaaggttaatgtattgaactggttttcagagtctgtgtttaaacttcgtactgcttatgtaaaacataacccactcacaactcacatctactttgatactgactcactagtgtcttctatcaattgtgtctatcccatagtttggtctaaaatgcagtctggggctggcaaggtagctcagcaggttacagtgcatgccaccaagcctggtaacctgagtacaggcccgggtcctgtatatagtaggaaaaagccaactgagaagcagtcccctgacaccctaacactcacctccacgtgtggctggcaagttcacacatacacacagtgaacagatgtaacaaaatgtagcctcgtttctttttcaacactactatcagtaatgagccaaagttgggttttaataaccctccccccattttcttagtaaagaaggaatcctttcttaagaattcactgttttgttttccaatttcatccacactgtcctccaatgcctggagtcaggcagtcttacctctgctgtccccaatgctggaactaccagcaggagtctctgcacatggcttcattctgtatatcattaaacatgtctgttgcagactggtaggaaccttaccaagtagttttaaatggttgctttttgtttttttgctttgcagactttgtacaggtttaattttttaaaatgttgaaacctatttccaattgaacaggtaatcctcccctgagcttcaaatcctggtcaacttctgtgtttccaactctggtcaccacactagaaataagtttctggtaattagggctcttctaaagaattattacgatgtttttagtttttgctagtttttgcaattatattatttcctccctttcctgtccttcttccctccttccttctactctttcaaatccatggctgctttatgtctgtgtgtattcttaaatatgtaagtacaatctgctcagtctgttgcttgtatgtgtatgtatgcatgtacaataccatttggtattgtataacaaactgatgtgctcttccctggagaagactattttccactctcagcatcccttagttgtctctagttgttgaggccttgtgagcttcccccttctatcttagcatatctattggtggtgttcttgttcagttcatgttttggcacttacgttcatgagatttcatggatgtagcttctctgacatcaggctctttgtattgtcactgacacactcaagtgcacagcatatattaggtggttagtatttgttgaaatagtcatttctacttaggtgtttcacagatgcgtccttatgtattccactgtttcctatatactgccattcatcctcctaggcactcataccagaagtatagctgaaagccctcataatcttgtatttaatcatagttcactctttgagtgtctgctatagaccaagttaaataacccctgcccttcaattctcagtgaagcttgtattgagggaagtagatattaaataaggatgtctaataaatgttcatataaatgttcatataaatgaacatataaatgaaaataaaggcatataaatggagttggtgggcaaaagggacctctttttcactgtctggtcaaggcctaaggagagtgaaaggagtcatatacagacttagagtgatccttagcagaagtaatggcaagtgtgaaatgtggccaagaccaaacctaacataagcatgactacctgagcaaagaatccactacagccttctctcctcagtgctaaggtttcagactatttctgttttcaaatctaccattaaagccagcccattttccatcccataataaatacttttcactttacaaattcaagttgtatcatttttatttttctcatgtacctgaacatgtatgatcacagttttaactgttccctgataatattagatcagtgttagtctggggctggtctcatttcgctaatctttctccatttcctgacccacatagtaactaaaaagattttacttttaattatgtgtatgtgtgggtctgtgtgtggatatgtgtacctgtgagcccataagtgttgtcagatccctgaatctagagttacagggagtctgacatcagtgcttgaaatcaaactggggtcctctccaagagtagtatgtgctcttaactgttgagtcttttctccagccacatttaacaatttttgactggccacacattgtgtattttatctgctgggtattagatatttttccattcctataaatattcttgttctgaaaggctgttacatagtcagagccctatatgaagcaggatggtatgtgtatggacagaaagcaaaaggtctgggaggtttggaactagagccagagatgagcttgccactgttagaacagcagatttaaacaaaatggaagtaaccatgctgggcagttttatcacaagctaagtagtttttgaaagggaacatcaatgagaacacaccctcaccccttccccactatactggcattttcttgatgtgggatggcccagttcactgtgggctatgccacccccatgggcaggtggtcctaggaaatgatgggggatgtccttctgtatgctgtgaatgtttcttttattggttgatgaataaagctgtttcagccaatggacaggcaggatgtagccaggcatagcaaccagactagaataattctggaaggaagatagtgagtctagagagagacaccatgtagccactgggaagttaggatgcctgggcattctctggtaagccaagaccatgtggatatatagattaataaaaatgtgttaataattgagagctagccaataagaagcctgagccattgacaaaattgtttacaattaatataagcctctgtgtgtatttatttgggactgaagggcggtgggactgggctgtacagaaaattccaactatagggatatacaagaaagcaggctgaacaagctgtaaggagcaaccaagtaagcattggttctccatggcctctacacagagttcctgccctgtttgagttcctcccaactttcctcattgatctagtgtgctatggaactctgtaactaaaataaactctttccttcccaagttgcttttggtcaacgtttttacacaacacaaaccctaagacagtagcagtcaaggttttaattacatgttgaaatagagtaagagactgtgtgactatctttggttgtcaacttgactctatctgaaatgaagtacaacccagaaatggagggcacacctgagatccagacctcgaagcaggatgacacttgcctttaatccagattttgaggtgggaaggcacatctttaatctgggcacacctgctggaggccaaagacaacgggagaaggaagtttgttcattcttcctttgcctgtttacccttgccttgtcagcatatctgttctttcactggctctggagcctacttctttgggattccagcatatacggaagaccagctgagacaatcagcctcctgggtggattaatatattcattctagaagatctgtgactctacagaaccctaatacagagactaaaccagaaaagtgatctacttccctatttccccctcccaaaacagtacacctaggtcaggtacattaacagataggtcttcaccacacagggaaccctgaaaagacttctgctgcaatattgtggacaggcaaatgcagtagggatggagtataaaaaggtcccccagtggtacatatgttggaggctctgaccccatgaatggattattcctttgatgacttcagactcggatggagcattgggagatgaaatctatgagcatctacagtagcatgcctctgggactatttctatgcctgcccttctgacctcgtgcttcctctgcttcccagctgccatgtggtgagcagcttcactccactctgctctttaccttcaagttctgcttcattaccacacacacacacacacagccaagtgagcacggagaaaactgtgggacaaaaataataaatctaccatcctttttactttaaaggcaagttgtcatagtaacagaaaattgacagtacagaggagaaaggactaggagtggagaaaatattaagtcacagtaaagtgtgaagtcctccccagtaggcttcagagactgctccccacccccaggcagtaaggaagaattcaggaaaatgaacccagatgataaaaacgctcattctggaacttttttttttttttttggaattagccattgtcaaaactaatcttctttccttgggggattccaagttcattatagtgaacatgaatgaaacatagtgaaaataaacacttagcaaacgtaaaggtcaaatactcattactaactttctaaaggcatagaaaaattaggatgagagttgaaaagaatgtgatcaattaaataatattcccattatggctatcattacatagagggaaacaaccaacaaaaaatgttatagcaattggcgactttaatatttaagaaaaattaagtccatatacacattaaaaatataggaaatttcatgcagacatgaagcttccaattcaaccttctggcaacgtttagaatgtgaattacatataaatagcatatcctttacacttctcaaacttgattatttcatactgccatttctgcagcttccctgtataggatatgtcctatcttgctcactgatcagaacctaaatttgcaccacctcaaagtcagaattaaaaactagcaagcacatgatcaccttatgaaaatgaaaaatttgtgtgtagaacaaatttaaaaaacagaatttaaaatttcaaggcttacacccatcagtggctagatctaaatataaaaaatataaaactaaactcctccagtgatacatctattaatgatttataccacattttcaagtttagaatatattaacttcaaaagcaacaagagaaagtaatgcaaatttataaggaatacttttaaaaatattcatgatataaggaaaactaaaaataaatgaaataactgatttcagagttaagtaaaatatataatttagaaatgtaagtagtattattaaagaataaaacatgacaggaaaaaaaaaaaaaaaaactttaagccgggcattggtggcgcacgcctttaatcccagcactcgggaggcagaggcagacggatctctgtgagttcgagaccagcctggtctacaagagctagttccaggacagcctccaaagtcacagagaaaccctgtctcgaaaaaccaaaaaaacaaaaacaaaaaaaacaaaaaaacccaaaaactttaggtaacaaaaccaacccactggtgtcagtctgttcttgtctttgtaagaaaaacaaaaccaaggctataaaaaaatattacaaaatgaataaaaacattcctaaatcacaactaagaaaacaaaacaaaaatatgcaatccttgctgttcaatgaatgtttttaaaatacattaatttttttttcccttaaaaaaatacccgggcggtggtggcccacgcctttagtccaagtactcgggaggcagaggcaggtggatttctgtgagttcaaggccagcctgggctataagagcaagtgccaggacagcctccaaagccacagagaaaccctgtctcagaaaaacaaaacaaaacaaaaaacaaactgcgtggtacataacacactgggaaggcaaaaatccctaccaggtcaagattccttgttgaccgagcagcttaaaaaataataataataattcggcaagatttttcacccttgcaaatggtgagaatttccacccttttatgaagtactgagcactggaaaaacaagaaatactttgaaaaggtaagtatatggctccatatacttcataaggggaggagagatgacaaaaattcctacactgtgtagaactcccaattagaaggacagcaggtcctatagacctacaaacctaagcaacatagaggcctagaggtttacaataaggcttcttattaaagcactgcaacatggcagttatgccaccagtacatactaaatccatctaatccaaatgacacagaggtcacagccatctgtgaaatagtcagcaagagctttttctttcttgtagatgttaaaacatcagccaattttgctttcctggctaatggaaacagagtaacaaacgttaaaactaacagtaacaaggaaaactccccccagacaggcctccctagaggtagaaaattaaagcagcatgcagactgtttaaacttcaaccctatcgggacaaaactggtattaatctggaattccatgaatggctgctgcctaggatactgaagacacagaccgtgggtattaacttatccctgaatttcatactcaaaacttctcacattaatcctatcatgacagtttttactaaaatacaatttaactaaaaaagtgcttgctttcataagccacatacttaataaatgacatcattgtaaacattacactgacaaactttataactcattgctaaattgaagttatgtaattcagatgggcagtttttatccttatttttccagttacttaacactgattaaaaaaaaaaaaaaaaaaaaaaaaacttttgtgcctctgaatgtttatatcttatacatttcaaaggaatccaggagttaacataagattcattttatcatggacaaagactgattttctctgttgattatatttcattgaattttctttcacctgtgatacaactgaattggtattccatagaagacatatttgatgcctctttaaattcagctgagctaagaaaaaaaaacaaatttgaataatgaaagaacagtttcaaagttctttaagtataggttatttaggtccaatgaaaacaaagttccagttccagatgctgaatatgacagaggatccttagactcttctaaaagaaatacgggcaacgtaaaacctcaaaaggagattagtgtggactttagcactatcggtcattaatatggcagacttgcaacagcttcatgaagatgggagtttaggtttattttcttaaagaaagacaattctgggcttcaaagaaaaaagtacttgaagatatttcctccattatatatctgcacgggagacattttctctgttatttttcttgtgcagtacaaatctgcatcgtatagtgtatttctgaaaaaagcaatagatattattaagaaaatagacactatttctaaatttttgttaggaataagaaggcaccactgatttgaggttgtgtcctgctgtcactgatagttgactgtgagttgtttatttcagtatttgctcatattaaacttttttctgggtaatatcacttaagaccattactgtggcttccggactacaaacaagacacattcatagtagtatttcatcatggagagatcattcacagtatatgttgacaatacagattctttttccacctgtaatacaaacaaaaatcataataagatcatgatggcaacactactaacaaataacaagaagttagtggtaggtggtatcataactatatttaaacaatacttcccataagactgatagcatccaaaatctcacaacattaataggtcatgtaagatcagcatcacaccactaacatatggttaaaaatggattcaaattcaggccatcttaactacaaagtgctacagatgcattgcttctctttattcataaatccacttttgtaagtgagtataatagtaaataatcaacttaacagccaaagtacaataaagttctatttaatacaggggtgtgggagaggagaaaggacaggaagtagaaagtaagatacaaagaattgcttctttgtacctgccttcccatcatctgccttctccagagtctagtgtacttggtacctgtcagtgagagattactcaggccattatcagctaccatttactgaaggtctatttcaacaggaattataattttccctttacatacatattgttccaaatctttacaattaagaaagccatgtaacaatagcttttctatctggatgaggagaagtgaagaagtaaagttagtaactgctataatgcctatattcctgtttaaaggctttcaagttaaactttggtactgtttcttacctccagttggaatccatactgcagaacaacatttttaatatcctcatagctcaattctatagaaagttcatttgccagattttcaaaatggtatagtagaggacctatggtttgaagatactatgaatgagttacatgaacataagctttgtacactgaattacagatgtactagtcgagtaggaaataaggtaaaaataaaaagatcaactacatttgctgaggacaatcatccaaacttgtggaacacaaacccatcagtttcagccaagaaaacaccatgtcacaattgtagcctcagattagtcttgtctttacctttgattcatttcatcataaatcctacatacagctagctccatttacactcctcagacaacatcctgagatgggggggaaaaaaagctaggaagataaaagtaacaagtgagacaatttctgctcctaagaggctttgccatcctgtcatgctgtgggtaaacacttacttctcctttagttttgaggtagtgtaaatggagttcttaattggtccagataataaaaactcaaattcagatatagagggaaatgctgagagatcagagagaaggagaaagccacagccacaccttacctccgtatcatctcagcagacaagacagcaatttcctgtttctccctgcttatatcctgtttctgctcagctacctcacttcctgtaggtctgtacagacctccagacctctatggttagctagtggcaagctccattctctgaccctcagataggctttatttgtatatgcaagatatcaccacatatcccccttttttgtctaaagtttttaaaaaggttttaactaatataagaaaaactataagtacaattactatatgcaatatatacatggcaacaagtacattaacaatgtctagtccattagcatatgacaaattccaagaaaatactccattatctattcttccttgatgtggccaaagtcttgtacctaatttactttctattctaatttgcattatcaaattatcttgtgatatcttttaaatctattacacttagcagattgatagtgagtttctttactgattatggtaaacaaggaaaactataactaactatactatttagtcttcaagtccctcagagacacaagaaggaaataacattaactgagtaaacaggaagtgttaacaagcaacttccaaaaactgtgggaaatgacagaaacagctggctgcctggacagccaccccagattgctctgtaagttggggcctccatcttcggcctataggcctagcatatctgacagcctttgacatggcaagactagccacttggggaagaaactgctcttgcctggactgtttgactgtatgctgtataaactggacatgcaggacccacaggaaagtgactgctgaacttgccaaaacaagatgggatagtccttcagggttcctgcttcatggaagagtctgtcagacattctacagggcacagagaaaaatgactgacaaactgccaatgcaggtgggacagtttcaaatttcctgcttcgctgagtagtattgccagacattctaggcttataggctgaagacagatgcttcaacattacagaggaattttgggtgactgtctaggcagcaggatgtctctgttaattctagaatttatatattatccttctgaggtctttctttgatggagttgaagatagatacttatggttacggttctccttagttatgatagaagataagttacatataaaactttagactcacaaagatagaatattttctttaaatgttgccaaatgtaaatggactaaatattgttaactatagttcttacttgataactatttttgttatatataattttactatgttaaagttaaaacctttctttttatttagacagaaaagaggagatgatgggggaatatccttctgtaaatatgtttctcttattggtcgatgaataaaacactgattggccagtagccaggtaggaagtgtaggcagggctaccagacaaagagaattctggcagagaggagctgccagagagacacatgtagctgccaaaggagtaacaggtccggatattctccagtaaggtaagaccatgtagaaatacatagattaataggtttgtgttaataatcaagacagagctagccagtaaaaagcctaagccatcggccagttcataattaatataagcctctgtgtagttatttgggactaaagggctgcgggacctggtggcacagaatctttgtctacaaggtagagtttttcaatgtagcgcaatgcctctgcctctcaaatgctaagaatctagttattctgttcctcccttctatttttaccctacctaaaccaccagaataaatgaccatgaatataattaatgttagcacacttttcaaaacaacagtggttcttctttaaaaactactcttagctgggcattggtggcgcacgcctttggtcccagcacttgggaggcagaggcaggtggatctctgtgagttcaaggacagcctggtctacagagtgagtgccaggacagcctccaaaacaatacagagaagccctgtcacgaaaaaaaaaaacaaaaaacaaaaaacaaaaaacaaaaaaacaaaaaaaaaaagaagagaaaaaagaaaaccaaaaacaaaaaacctattcttcctgagacaatttctggccatctgttcagtcctaaactacatcagagccttcttagcgtgcagagctttacagcaatctttatagcctttgaagcttattttatgcctctcccgttccacttccttttaaatgtttattttatgtgcatggatgtttttgcctgcaagtatgtgtatgcaccatgtggaggccaggaaatggcatcagagcctcctggaactggagttagttagagaaggttgtgagccactgccaacatggcagtgctgggactaaacctgggtcctccgcaagagtagtaagttctcttagccactgagccttctctacagccccccttgctctagtgttttaagcgcatctgaaagtacagttttgtaggtatacacgcccgcaatgagccatctgtattgtctttctacttccatgtttgatctcaaaagcctataaagccctacccatcaaactcaaattttagctatgcttcaaaattttgctgaaatccataattccagcctgattgatcgatcattcttgcaaaagctaatcttggttgtcaacttgatgcacctgggaagagttgtgtctttcaaccaaggaactatccccttaagattgacctttggatatgttaatgaggcattttctggttgctaatgatgcaaaagagcacagtccactgtggggagtgtcatccttagacatttgggaccagggtgtggcaagaaaagtagctgagcaagccagagaaagcaatcaggaagtagaattcctctgttgtttctgcttcaagctcctgcctgccttggtttccctgcatgattgactataatctgtaagttaaaataacccattcacagtacaacatcctttaaaactcatttactgcagtgtaccttcaggcaagtatcaggattctctaatttgcaaacaaatcatcaagcaatgacacagatgagtgtggtgcatatgaacatgtgtggcatcagaggatgacactggatatccttctctatcattctctaccttatttcttcaagacaaggtctcttattgaacctgggaccatctatggtagtggccagcaagccccagtaatcctctatctctgtctccaacagcactgggctttcaggcatgctcatggcaacatctgccttttcattttataagatttattttatttatgtgtatgtgtctttgttaagtgcacgccacatttctgcagatacctgcagaggcctaaagaaggaatcagattcatccagtgattgaaatacaggctgttgtgagccatgaaacatgggtctgggaatcaaactctggcccaccggatgagtagcaagtgctcttaacctctaagccatgtctccaagctgaatatctggctttgtatatgggtgctaggatttaaattcaggtcctcatggttgcatagcaagcattcccatccatataaccatctcaccagctcaaagatgatgtctttaattttcttttaagtctaccaaaatgaccagtaaatgctgactatataacttaagtgtttatagcattatcagttaaggacaataactggtgtgaatatattctgtagtcttttgttataaagtctgctttgacagatatctccacatatttcagatcttttcttatacaaaaacacttcttgagataacaaatatttttactgacttggttcaacctgccaagagttacagatggaggtcccttattcaaagtatttaagtacaggtgttttagattttagaatatttacatatacaaaaggaagtagaggaagggactgagtccaaccacaaaactagtttgtttcatatatactaaattgcacagcctaatagttgtctggacagtactgcacaaccaagggctttgcttgtaaggctctaccaatgagttataatcctaaactataaaactaattttgtacagtacttttagtgcacatacatgctgcctatgatctgtcagatgagatcatgtatgaactttgccacttagcatatcaacattttagatttttgagcaatttagactttcaagttaggaaagatctgcatagattttcattcacaactgcatgaggagtaatgtctcaaaaccttatcaggggtgagaaggaatggaactgttactctggaaaacaggttagtagtttctggcaaaatttggtatcatcacacataactaagaaatttatttactaggtgttaaaccaagagaaatgaattcttcttcttcttcttcttcttcttcttcttcttcttcttcttcttcttcttcttcttcttcttctcctcctcctcctcctcctcctcctcctcctcctcctcctccctcctcctcctcctcctcctcctcctcctcctcctcctcctcctccttcctttctccttctcttcctcctcctcccccccatctctctcttcccgagacaggggttctctgtgtagctttttagacaaagctggccttgaactcactgaaatccacctgcctctgcctctcgagtgctgggattaaaggtgtgtgccactactgtccggcccaagaaatgaaactttatagccacacgtaagattttgtgccaagtgttgatagcaactttattcctaaccagcacagtctggaaaaaaaaaaaatcaaatgtccatccactgagaactgataaataaaatgtcacccatccatccagtgaagtatcattcagcaataaaagggaatagcacactggttatgtagcaacctaggtgggtctcaaaatcatcatgctagataatggagccagatacattaagtactacaccatagggttctggttatatgatattcttgaaagggggaaacttgggttacagaaacccaaacagaaattgtcagttatttttttcaattatcatctcttttcaaattaaaagaacaaagatgttttttccttgaccataaaatatagagtaagctcagacagttaaggcaacatgaaagagcatcaaaagaaaataaaaccatctctaatccattcactgactctcggtagcaaatatactgtatctccttgcaggctttccttgatgcacagtataaagtattacatgcatggttcagcgtcttaagctttgttcattatgtctaaggaatatgcttactgtggaaatcttaaaactacttatccatttcctgctgttaggagacaggtccagtctaaaatttgttgggcatgcctgttcattaactgacttttagtgttaggccttatctaattattttcttctgacagaaaatataattaaacaaatatagaatattattagcaaatacttaaggctttgtgggccacatatacttcccatatcacttactatttatgaagtattaaagtaaggtagctttttctattattgtaattcttcagattgttttgaaaccctgtggctagatgactggaaggtctaactgtcctcttataagctacctgctccatgacttctcttgcccagtactgtaagacatactgtatcataaactactttcagctaacagccctccagcttagaaaggccaactttgtttcaggcatttattatataactcagtaaaatattaataaaacaagtgttcgtgagtaaaatattaataaaacaagtgttcgtgcacaaagttgcttttatcagttaaatcaagtaccttagaaggacaacaaaccttatcataacacagaactagaatctaaacctatatatatatatatatagttaatgctaagcacaaactgacagtgtcaggccatgggcctgcctcttgccacaagtaaactctgggacctttctactagttatttaagcaagactcactttctttcactattagtaaatactgccgtttcattagggttgctcagggaggctgaggatatagctcaatggaaagagcacttgtctaggtacacaggccctaccctgatccctaggaacacaaaacaggataggattgctatgaatttaaattatttataagggtacccaaatcacaggaaacacatagattctcagtagtggccttcattccctgggccaactttcccaaagcatttacttttaaactcctaaagtctgaggtatttgacccttatgatgactggattttacagctgttctcatctaatcttaaaaattctgaagagaaagtggcaagatttactacttctagtcttgatcctgatgaaaaaaaaattctagtataaataaaatcattatacagtacaattgacagaacctcagcaataaactaggcctttaagtatctgtccttttctgtggtagagtcctcatcatgaaagtctcatcatattcaaagtgtggttaactttttcaacatagggtatacatcacacttaaggaagagaggcacacttaaatggacactccttctacctttaagaggagaaaataagcaattccctttagattcttgataaacaacaagtcatactcataattttgtctagtatcaagcagtagactcaaagtacaagggttttttgcatatatgaaattgtatttctattgcttcttaaactcatggtagttagaaaaactacctcatctactgaggaagagaattccatgatggaggtaaaatccttcttctaaagattaaaaacaataaaacattgtcctcttctttgtgtgtgaacttttttttttttggaaaatagattctactctcatacaataatgcatcccaaccagtttcccctccctccactcttcctaactccccacacttttaccctttctcagattcactcccctccatttcctcttcaggaaagagcaggtctccatgagactcgagccagccaggacaaaacaagatacagtaagacaaggtgaaagctctcatatcgaggctggacaaaccaacctaacaggaggaaaagagtctcacgagcgggcaaaagagcaggatatacatacccccactgttaggaatctttttgttgttgttggattttttggggggttttccaggcagggtttctctgtgtagctttggagcctatcctggcactcgctctggagaccaggctggccttgagctcagagatccgcctgcctctgcctcccaagtgctgggattaaaggcgtgcgccaccaatacccagccactgttaggagtcttgcaagaacaccaagctaacagtcataaaatatactcagaggggagaaacccacagaaacagctgatctgaacaaggggttgctcatggactccaaattgatagctgggaaaccaccataggatcgttccagactccctgaacgaggatgtcagtttggaggtctggacaatctatagggccactggtagtggatcagtatttacccctagtacacaaatggactttgggagccctctccacacagagggatactctctcagcctagacacactggggagggtctaggccctgctccaaatgatgtgtcagaatctgaagattccccccatggaagacctcaccctccctggggagcagaaaggggatcagtgaggggcaaggggaggtggggaggcagagggaactgagactggcatgtgaaagaagcttgttgctaatttaaataaacaaacaaacaaacatgtagtcagaggatctggtgcagacctatgcaggccccatgtttgctacttcagtctctgaaaacactctcttcttgagactgaaatgccaccaccttcatggaatgggaagagtacaagggactgagtactgaatcagcatattaaacttagtatgtgctgaagttaagacccacaaggctgacctaagaaggttatcccaatgcttggactgccactgcattcaagcggtatcacacgctcggacgtagtctaacggaaaatacaacacaattataatgttcacaagcatctgatactgtgcctctgccaaatggaaaagagctctaatcctaaaacagatgtgtaaaatgttcatgaacatgaaaacacttaccaaggtttatccaaattccacctggcttgagtattctccatattgtatcgatataatcaattacattgtgagctgtgtctatgaagaaacaggtggcaatgcagtcccaggtatctaatcaacagaaatcagaccactgcatctgttattttgtttatgttgtttttctattaccctttaagcttgccaactaactctttcagagtattaagatttcatttacctgaagggatatatcactgtactataattataaacactacaatccagatgattatagcacagtagttacagtagtcaatttggaaatcatgtgttattaacacatcactacatgttaccaaatgatactactaaagagttgcttagcgtctactcaactgctagtctttagttttactatgtttacttctgtgatacttgtaattaaacctagggtcttaagctaggaaagtgctctgtgactgggctaccctaactctcatctaaaatctgttaaaataacagtcaccttaaattttgagttctgattgaaaccagtgttaatcactgattctggcaggttttagaagcaggcctttcttgtcattgagaaatgatgacatcaaaatacccaaacacctaccatgacttgataatcatcagggagaagatggctggggaaaacacaggcaaacatgggcccccaacaagaactctggttagctcttggaaactgttgccaggcagaggtagggaccagatttgagatgtagtgcctattctagttctgatgtggtaaaagtgccctgcctaaaagagatcacctgcgtcctcttccagtcccagtcagaggaaaatgattcttagctgcatcgtgatactttccactatttctctattctgagatcttgttcctaaacatttacccaacagcttaacctctcccagtgttcttttctaacttcagaatgcaggttgtcccaatctcagaatttaggggaaacaaaaacctattttgggaaattagatacacaaaatcttactgtgctttaagccatcttctgggggcttcctgtccttctcagagtacaactcaatttcttgctctgaggtggcctaaccaaccctctaccctcttatctccctcgtccccataacccatttcaccataaccctcctaagcacagccaagtgctctaccctaacacccttgccattcctaaacatgtaagtgacaatttccttcttagtttctattttcttccaaacaatactgtacgttagggtctctcagtcacttccagagtggctaggaactttgtccggtggaccattgtgctttgaatgtctagaatgtacttgtcacttcagttggtaaacagatttgttgaaagaatactcttgctactgctcagaattgttttccttcttcctgctcctgccagttcatattctcccctttccattactgcctccctccaatagcttccataatctgccagactgaaatcgaacttccaacctgaagcaagtcttctgcaactgaagctaacctacttttcaaaacatagctctttccttgccaatctaaccctgccacagtctctgatgaccttattcttttgtatctttgtatctcaaataactattggtctctgtccatcaagtcacagcctctttaccaagagctccattcctactattttatttctaccttactccaatcggcacacataatttgaactcctttgaacatctcttgaatgtacatctttttctttacatttcctgtcactgcccttttcgctactttgaaaatattctataatgtcactgacattgcacaccttttattccatcatcaaaacaaatagttacaacactgggttcaccatttacagtaacagataagttcttaaatacttgctttgaacttactgcattctgagtaaatctcctgaaagtctcctgctgtcattgaaaagttagaacctggaggaagactgtgggggtcaacatcagggaaaaaaatgggtcgaatctgatcagctgatctccgattattgctaaactgatggatccagggataaagttgatatttgttaatttcagaacatctgtaaaatatgagcataaggttcaatgttaaccattcattttaccaaagatgaatcaactttaagtactaaactatctattgatagaaggttttcacatgtaacttattagactgaagagtgttaatctatacttcactcagttatctgaagctgtgtatacatgtagatgaccaaccatgattaaaagaaattcagagattctcatgtgctattaatttgaatttattaaaaaatattacatttttattggtttttcagaaagggtcttatgtagcccagcgtggccttgaactcactgtgtactaaagatgacattaaattcttgatcctcttgtttttaaccccacaaaagctgagattagaggcctgtgccaccacacccagcaaaaatgtattcctgaatctcaaacttgagtaaaaacaaggaaactagtcttgttacctatttttaccattttatatgtaaccttcttcttcccccatctcaccagcaactcatactgccaccagtaacacagcattgcattgaagaactgggtaaattaccaggaatgtgctattgaaacaggcagcaaattctttgtctctaacacactgtaacttctaacttaaaaatagtaactcttttccactaccgtctggtagaagacaaagcttctcagacctcattccaaatcagttatgtgaacatgtatggccacttactgcaaagtcagttagtgaaaatagttagagttgctatcataaactcttcaccaagaaacaaaaggtgaaaaagcttaaaaaaacaataagaaaaaaaaaaaccctatagaattaattaattaattaatttcatggaatgcccaattactttctaaacagttgtttgattgccctgtgtcaacatgttagctaattaacactggctacattagcaatcaatataaacattatgaatttaatgtaaatatgatctacatcagtgaagtactatatacttttcttctattttagaattgttcaaaaataggtaaagcaaattgattttaagaagttactatttccagcaaaaagtaaattaaatacctgttgagtacaaagttggaagaaaagagcataaaaaaactccattcatttccttgacaagcataacctagcatagctatttcccaggccaatcttcctagtccagcaccaggtaccagaatatttactttagaaggatccctgaaatgaaacaaggcaattatatccagcccctcaaagaggaaaaaaaaaattaaagaaaaaaaagataagatccatgttaacaactaaaaatttactgaattattcaatacaaataagcttatttggactcttcttaagatgaaatatttccaaatgtcaataaaaatgagataaaaggaatcattacattatcaaatgagggttttattccctccaaaaaatacttttcaagaaaaaaaaatggaatcacattgtatctaaagacttatagttattcttatttctgggaagataaattatcccagagtgatccccaaattatatatgggacatttgaacaattacttcatcatgcagcggagaaggcggagaacactttacttctaaactcatacagtgcaacaatttacagaaccaaataaattaattatatttagattttaatgtataaaatctatctctaaaactttatagatctcgggtacagaaaggaaaaggccaaagttctgggcacagtagttcatacctgtaattccaggattgggaggctcacagtgctaccactgactgtgagactagcctgatcctcagtgtaaattccagagtagcttggtagacaaaataggactctgtttccactgcccctacacctctctcaaaagagagaggaaggagtagatggacagatattctcttggagaaaatgggcaattgccttcatttccaaagagtttcattaagtagccccagtctggcctcaaactcatgaccttcctgtcatagttccccttgcaagtacttctgggcaagcattcatcacaaatacaaaccagaccagagccctatttatcccatcacacagtgctaaatgttcctcttctctaagttctgctagtctactttcacactgcaatacgcttcaggaaaaaaagaagtgtgtttggggatgggtgggggactttcctcgggaaccctggcaaatcaaactatagggtcagaaagatcactcactgggtacaagctgctgtgactaaggctgacaaaccaagttcaatccctgggaccatgatggaaggggaggaccaaacctttcgggctatcccctaacctccacatgtgtccccgagtgcatgcactggtatatacatgggtgcatgcatgcacacacacataactttttttaatgtggggaaaatcacattggtgtaggaaaccaaaggaaaatgtgtgtaaccagttggtatcgtttctataaaagaaatttaactgttaacatttccaaacttggttaacaaatctaattctatttcaaaccattcaaatcttaaaaactacctgttccctgggtcttgcactctcaaagagaaacagggcattttcactagcattttattctataggggaatctatgcatattccattttaaaacaaacaaacaaacttggggccagggaaatgactcaatcagtaaagcgcttgccatgaagccctgaggacttgaaatgcatctccaaacagccaggcaatcctagcactaggaaggcaaaaacaagaggatgcccagggattgctggccagtctacctagctgaattagtgagctccaggtgcaatgagagaccctatctaaaaaataagatgccgaacaattgaggaagacatccaatgttacttccagcctccacatgcatgtgtacccacatacacatgtacacataaacaaacaacttagggggccggacgctggttgcgcacacctttaatcccagcactcgggaggcagagacaggaggatctctgtgagttcgaggccagtctggtctacagaacctccaaagcaatacagagaaatcctgtctcaaaaaaccaaaaataaaaaaaagaaacaaacaacctatggaagtttgaaaattcagtcaacaaatgtagtcccaaaggaattagcctgaggtaatttggttttataaataaatttatggaacacgtttgaataatacacctgccaggaatgggcacacatcttcaatccccacactcaggagactgaggcaggtggatcattgtgaatttggggccacccgtgactacatagtgagttccaggccagccagagctacacaatgaaaattttgcctttaaagaaacaaaacaaagcccaacaagaacaatggagaaacttatagaagattagctttacaattgcttttatcaaaatttccctaaccagaaccatcaactttgtgccaacaggtatcctggcatactgctattaaaaggcaccaagacacaaaatacagaatacatcaaacccctctcccccaagttagcagagactactatagatcttcaaactgtttgtattatgacaaataggtattttcaaagggccttaaaacaaattcagtagaataaaaatatgattgaacaaaaacccaacaaggaatggggaagagggcatacatgctttcctaaatgtgcagtactgactaggtgttcccccaaaggtgtacacgctgatatgagttttcaccaagtctcaagtatttcttatcttcatggagaagagaaataaaataaaacaatcaaatgtttcctgcttgagattctcagcaaaaaaagtagcaagctgaccaagttagtaaggtgcatttactacaaatatgacccctaacacacgagaacagtctcagcagttcatttaagacaggagtggccgggtgttggtggcgcacacctttaatcccagcactcgggaggcagaggcaggcggatctctgtgagttcgaggccagcctggtctccagagcgagtgccaggataggctccaaagctacacagagaaaccctgtctcgaaaaacaaaaaaacaaaaaacaaaacaaaaacaaaacaaaaaaagacaggagtgaagaagaggtggacctatgaggacaaaactaaacagacacaagcagactagactgttttaccaacagtaaatgttcttgacagagctctaagtaagtaactatacaaattagcaaaagctattctttttttgtggtatcagcacagtgacactttgctgccccctggtggcagaaatattctctatattccctccatcttctctctctctctctttttggtttttcgagacagggtttctctgtagctttggaggctgtcctggaactagctcttgtagaccaggctggtctcgaactcacagagatccgcctgcctctgcctcccaagtgctgggattaaaggcgtgcgccaccaacacccaaggccatcttctcttttaagctaacaaatcccttcaaatacaattaaagtcttcattttaatataaatagaaaaatgcttcttaaaattcagtgtttttcctaaatgctatgagaaagatcaattttcaccaagtccgcctgtcagtaccttcttggagtagtgacatacccataaacatcaccccaaatagttttaaaacaggctactgaataaagatcttaaaataactcaacagttcttatgataaaaactgagcctttaagacaggctcaaatgtctttttccttcacatctgtgttcttcatagcactaaaccagcagacacttggggaaaccgggcatttgttttgttgtttttctttatgtttgtttgggtgaagatttcaatatatactattctaccaaagtttagcattatactatccttgtgctcatatttaagaaaacagttcagacctcgagctcacatgttatgcttgagacagggtctcaatacttattggctagcattaaacaagctataccacagtggccttgaacttgcgttgctcctcccgcctctccctcctgaatgctaggattgctcatctaagagccaccacattcaggtaagcatggaatttttcttttttctttttttggagacagggtttctctgtgcagccttggctgtcctggaactcgctctgtagaccagaatggcctcaattcacaaagatatacctgcctctgccttcccggttctgggtttaaagtaatgcaccaccaacacttggctaagctttgattttaaatgaaagtaaaagagtactgtttattaacatcaatgtgcaactgttcacaatagtagtgcagaaaaccaccttagggttaaaacaaagcagagaccagtgatctggaactggcaaaatatagaaagcatttcctcatcaacaaacaaccctttgcaggatttgtgccttcaaattttgtacttaaaaattcaagcattattcccaaacttgaacaaacaggtaaaataaacatcattggtggcactcagcaggcaggggcaggtggatctctgtgagttcgaggccagcctggtctaagaagttctatgcatatttgttaaataagctatctctatggacatctcaggatggccatcactgaaatctcagttaaggaaaggcagttgaaactgagtcaaatccagctcaagtagaaataaggccgtcaagttcttatgccagctgtggcaccatctgagacacagatgacaatgctttatccagaactaacttggactctgaaggactataactaatgtgcctcatccaggtccttttctttctctgagacgggggtttgctgtgcaacgcaggctgacctcaaagtcacaatcatcctgcctcagccatgtaggagcacaggtccatgaccccacgcctacacctggctctgggggtttacattttatgggaaagctatgacttaatatgtatgtggccttactgcttaacgttatctactataaggcagctaatccaagcaaaacaatacaaaataatataaaaggaaatacataattttcccatcaggcctaagactagtggtattaagcatccccatcccatatatttcatttaaagtttgtgagtgtgtgtatgtataaccttatcatgtctgtagcattctttgtagttttcagggatggaaagcaggtggctggggagcagtgacaggagattcacatccttcttaaccctgaactcttcttttacctactaaaaaatacctctaattattcttttacttttaatgtaatttactagaaacacctggagttaattcatccatttacctgcttacactctgtcaacactctaatagcagaaaagtacctgtaaaacagtagtgagtgtgcatactaagtgcctttaataaggacatgttttagttaggctagtattgaaaggctgattaaacacaatagcatatattatttaagaatctgagtctgaataaaattataaataatcaaaattatgttgacataagcatctgatcttttagcctttgaaattcattcaaactttgttacactcaaattttaaagagccttactttacaatctactttcagaaacaaagatactttgaatttccagggctatgtagcctttaaagaagctattatctagtactttattgagcaaagcactgatgacattcaaagagaataaaaactagaaacattaaaacaaataatatccccacagaagtaatgatattcataaaggttcataaacttaaagcaattataaaaactataaaaagttagtaaaagagattagctcattactctaatagctatggaatccttcatgaactgctactaataagaatcttaggcaagaatgtagctcagacactacaataggagccattatatataggtttaaagagaattctggcactagggaaatgtccagagatctacgagtttgacccctactaacaatctaagcagtggttgagaggctactttaaatgcccttctctgatgagattgatggctaccttatatgccatcctcgagccttcatccattagctgacagaagctgatgcggacacccacagctaaacactgagctgaactctggaatccagttgcagagagggaggagtcatgagcaaaggggtcagaaccagactggagaaacccatagggacagctgacctgaacaagggattgctcatggatcccagaatgatagctgggaaacaagctgttccagacaccctgaacaaggatgtcagtttggagatctgggcaatctatggggcctctggtaatgaatcagtatttatccctagtatatgaatggactttgggagccctctctacatgaagggatacgctctcagcctagacaaacaggggagggtctaggctctgctccaaatgatatgacagactttgaagatccccccatagaaggccgcgccctccctagggagcagaaaggggatgggatgggggtgagggggacaggggagaaagggctggagagggaactgggattgacatgtaaaagaagcttgtttctaagaaaaaaaaaagaatgtagctcagtgctaggggccacatgtagcaagcacttaaacagataacttgtagtagcactaatctgagtgcagcagcccttaagtactgaagtttgtagtatttcaactcaaagtaaaagtagagtcttcaagatgattcttactgaagattgcttcctatcatccagagaagaataaaaaaacaagctgtcatcacctcaaagtcccatgggtagaaggcaaggcttagtcctagcaaaagaaactataggcctatcccttataatgaataattgtagaaatcccaaagtattagcaaatctaacccaataatacgcttaggaaattacttaccataaccaaatacaatttatcccaagaaggcaaagatggtttcacacaacaaaatgagattttaataaaatggggcaggggagtgtgaagtggggtagggggtagacctcaacaaggttgtctcaatagactcaaaaggtatttaacaatacccaacatccttctaagaaagatggaaattattcaacaagaaaaagggaattgtgaaaacccccagttagtattatactcggtggtgaaaaagagaaagctttctccctaagaacaaaaacaaggaataaaaggcattcaagttgggaaggaagaaataaagactttttgcatgatgtcttacacatgggaatcctccccacatcgaggagggaaaaaaaaaaaaaaactataagaatgctaaatccaggggctggagtgatggctcagaggttaagagcactgtctgctctttcagaggtcctgagttcaattcccagcaaccacatggtggctcacaaccatctataatgagatttggtgccctcttctaggctgcaagcatacatgcagacaaaacactgtatacataataataaataaatcttaaaaaaaaaaaaaaagaatgctaaatccagccaggcattggtggtgcatgcctttaatcccagcactcgggagacagaggcaggtggatctctgagttcaaggctagcctggtctatagagcaagttctaggactacctccaaagcaatgcagagaaaccctgtcttgaaaaaacaaaacaaaaagaatgctaaatcctattaagaaagtacagttcaaaatgtcaaaagcccaaagcatttacaccatgattttatgtttattctcctgaaattaaactacatggcacaatggggaagtgaatcaatgcatatgtgcataaaaatgccataatgaaacccattatgttgaacgctaacttaaaaaaaaaataaaatgaagaaatgatactttgggtggaaaaaaaacaaaaacaaaacacccaaattgtgacaattttaaaaatagtaattaaaacacacacacatgcacatagacagaaagaggtatttaaaccagctgagatagtcaagcattttgtgttaagggtgatcagcaacaaaaatatcttgctcctagcctatgcagatgacaccatcaataagccaacagtttcctgtggcacatagtagttgatttactattgaagaagtaattgtttttatgcaagagaccagtaactatttactgttgtaaaattttttcctattattgtccgaggaagatgctaaaaatcaatgtgtataaaacagaagataaaatgtagacaaaaccttataaattagtttattttctagaaagaggcaagaatcctgtatttcttgatacaaggtttacagaaatttttcttaagagactgtctgaagcagtaagtacttgcaagtatttcagaaatttaaaacaaattatttatcctgccctctatactagtgtcctgacagcaaaggcaaaatatcatgtttttgattaatttattgacactcatctccactttttttaacataaaatgtcccaccaaaacaaaattgttaatgcaaaaactcaagaaaatgaaagaagttttcaaaagaaacctacaggcaacaaagatgttggaattattgagtaggaactaaaaaaaaaaaaaaaacgagaacaagcaaaaaaaaaaaaaaaatcactgttaactgcattgaactgagatgtagcagcaccatgcccatagtccctactctggaggtagatctagatgggaggatttgaaattcaaggccaacatgagctcatgagctacaatgagacctcgtctcagaaaagcataaagttaagcatctaatcaaagagatacaccatgtgtacaagggagcaattcaacaccgagcatgagtgtgtgtttatgtctgtgcgtcaaaagacataaaagcaaatgacatctgagtaacaatgaacagacctcatatttactttggggttctacatagtattctatactacaaggaaccaaatccttggaaaaacagccatgcctcacaggaaactacaacatgggtcttaagtatcttatatttttcataaaaaaaaaaaaaatccccaaaggataaagaaatttgaacaacaaacttaaaacaacagtaacagattatagttcactgaataaaataggaactatgaatcattgaaataaatatacagagagtagacagaagagccttccttttagtaggaaacagcctgcaaactctgaagattagaaggaccatcacttcacagatggcttcataagaaccaccagtggttggaacagacaggaaatgttctaaggacactaccagggcaattatgaaatctgggtatacactattagattcctgaatctctggtaactggaagggaacaagtctgcccctgtgtggtggcacacacttttaatcccagactgaggagaggagacagaggcagatggatctcagcgctccaggttagccagaagttccaggtcacccagggctatgtggcgagaccctgaagactaaaactgtgaatctctaagcagtaagaaagcatggcaaatgctaacggaagtctcaaacggcttcacagtaattctgaatgtgtgcctgtagatgtccacgtgctagaagatggcgggaaggagaatgggagaacgatacagtgatgctgtaaaggtcaaaacttgatgagttttggtaaagagtatatggaaggtggttgtacaattcatgaaccataattctgaagttatttcaaaattaaaagttcgaagagagaaaagagagacacaggcactggcattccgaaaaggctacaccctgaacacaaggacctatagaatcccagtggtcccaggacaaaattcactgaacttatgagcaggaggaaaacttatattttattatttgttaaaaatggtctactttgggggctggagagatggctcagaggttaagagcaccagctgctcttccagaggtcctgagttcaaatcccagcaaccacatggtggctcacaaccatctataatgagatctggtgccctcttctggtgtgcagatatacatggaagcagaatgttgtatacataataaataaataaaatcttaaaaaaaaaaaaaaaaaaaaggtctactttgggctagagagatggctcagcggttaagagcactgactattcttccagaggtcctgagttcaattcccagcaaccacatggtgactcaaaaccaccttgaatgagatctggtgccctctgctggaatgcaggcaaaagtctttatacataataaataaatgaaaatctttaaaaaaaaaaaaaagtctactttaaattgtatgtatatatatgtatacaaatgagctatgggagtgaggatgcccacagggtccagagggggcatcgggatcttgtggagctggaattacaggtgattgtgagccgcctgatagtgttcagctggcaacagagcttgagtcctccctctacaagagcagtaaagtacatgctccaactgctgagccatctctccagccccaaacagattctaactgcaataatctttaattgatacttttcctcaattacaaaatgctggcagtgagcaataggaatcctatcaccaataggaatcacatttttatcaaaataatgtacaaactattcagcattttcataatatagttcttatacccactgtcaggctgtatttaataaatacattgtaaaaagaatataatagcacagtatttgctttaattaagacacattacttattttgtttatatgtgtgtgtgtgtgtatgtgtgttgcactagaaatttatactgagtgtcttcctcagttgcttcccaccttatttttgagacaggacagagtctccaagctcaaggactacaaagggcctggcttcttaagcaggtgctggggatccaaacacaggcaccaccccagcccttcacaagtctgctttttaaagatttcagtaactttacttcaaaatgactggttctttgtagccctgtgcatttcactttattcattacaaaagttagtctgaaaaaccagaccatgagcttcagaatgccccaaagttctatgttcaaaaaagttaattacttctctatggtatatatagatccctgatttcttttaagtatgtcataatgagataaagtaaaatcaatcactattgctttgttataaaaacaacttacaaagcagtgtgtattattgactgtgaatacttacctaactttagtttcaaatttctcataattactagagcaaatgatatgaagataaaacctccaacctcacacaacggaagcatccaataacaaacagctctcttacacacgtaaaaacatgcagacacagtgcggctatgagaatgaatcacaaggtgaaatgtctcagctaagcgttcatacaccttaaagaaagaggatagaaatgcagtagtatttaccatctctcttttggaaagttttttataatttcttttatgattggcttatagcaggcatccctttctgttttcccagtttcactccagtctcttacaaactgtttcaacgtagattttaacttgtccatgtcaaaagtagatgctggcgtaatctttccattaccctgtttaagggggaaagaaaaaaaaaaaagaattattttctgagagtcaattttgaatatggctaaatgagcattctaagatataggtggatgagtggataattactagtctctcaccctcgcctaaggtctcaaatgcagcttgtgatcctacatgagaaaaatttggtgctctcatgtctacccttaacagaggaagattcattaatcataaacaaccacaaagtgaagcagtccttactcgggaaaggaccagcactgagaggatgtgctatggagacagaacatcccaccttccaggagagggaagaaaacccctccagctcattgatgggcagcactgatggctaatactggactggccaaactgcatgtaacatgtggatacaaagagacttcagcttctattactgccagtcacttgagatttacacgaaaatatttttattttaaagtgaaaggtgaatattaacaaatgggagacactgaaaaagcagcaagggaaactaatatagctagtaaagtcgtttaaaaatttaagtaagtcccttgtatactataacattcaaaataccatgtgaaagcatcaacaattatctaggtgttaaaaaaaaaaaaaacaatgaacaaatgcaatctctagcatactattcttctagcttcatcacatcctcaataaagtggatgacccgctcaagacctgggcatatagacagttaccctaaaatgaaaagagatagaataagtttcacatacatcttctccatattctttattttcaaacatatgtatgcaatcattcacaatggtcagcagtatttcctgattatgatcaatgcatttccggatctcgtccaagtgaagaggaaagcgaggaagcagttgctgctggttatgtggaagtgatcgaaattgtctttctgttcggttcactcgttcgtgcatactggtgctaaaacagaaaaggtgttttattctaattggcaaaaagaattctctcaccagaggcaacctcgttttaagatcgtcaccctacataactatttcccagttatgctggacactgcgcttattcactatcctttgacttttgaaggatatcagcttagaaagtttatgtttttactgcatgaggaatacttctcagagcaatgaacaacaacaaaatggtaaaaagcagacatgtgcactaataagagaaaacaaagattaatttacaattttttaattaatttcagttttcaaattaaatactttggacaaaactggaggatggctttgattcctatttcatcaagtagtaacatgttgctgtaaaagtacattaaaatggcttgggtatatacttcagtgacaaagtacttgtccagcatgtttgaggagcctaagttaaatccccagaatcaaaatagtagtatgttttgaaactaactaaaagccagccaagttgaattttgaaaaatataaagcatataatacaaaagtattacacaaataaaaattaagattctaaagtgtaatattcacagttttcattgcaaaggtttcctaaattgaaaggttgctttggggactgcttattcaggaagtaaaaagaacagccttatttttagaacctaagtataatcacaactaagtgtcattttacatcagccaaactggcaaaaatctagaaatccaactagaccaaatgttggtgaaattgtggaaaaattagaacatttacccactaatggtgaatgcagagatgagtataaccactttgcaaaataacaacatccttagttaaccttaatgttctacctgccctatgatctaaaaattgtactccaacacatactcaagaaaaacaagctatcttcaccacagcactgtcaaatagcaaacataaaatcccacagaccacaaaaagcccattattggtggtcaggataaagaaatcatagttacatagtggagtatagagaaatgaacaaagtacagctacaactgtaacacagataaaaatgagaatacaagtatttgttgaagatagcaaattaaagaacacatgatatacaactccattttatataacattaaataacacattgtttaggaaccaagcaagtatgaaaggaaatgaagtttcagaaacaccctctctgaggaaaaggagcgggacagtgtgtgtgtgtgtctgcgtgcgcccgctcataagcattcactgcagcattctttatattctctatatacaaataaaacaagtatttctttaaaatgaaaaagtaaatactttctgtgaagactaatgacgcacagaagaagctcttgctatgcatacatgtcatagtcacaaagcatgggtggcactctggtagcgaggccctgaggatgacgtaagaggccacctgagcagtggttgcatggacactgattttttttacactggggacagtatgaccgttctcaaatctgttaccactatgtgatccttttacacccctaagtgtcttgataaaacaaggtaaaaataatgatcatggaaatatcatttattgaaatgtaatagctgccaagcatgtacatagcccacaagatatgtataattatagtcctcttataaaacccacaaggtaggtatcatgataatagtcctctgtttgttccatcagtcttcactgtatatgaaaacttagtgaacatagttaagtacttgttttggtttatataaagttcctttccttaaagaagaaaaaaaaaagccaaaaatatatattaaagtcctggttcctagctagtagtactttctggggtcggttctagaaagtctaagaggtagctggagatgatactggggcatcttgtgcagagcctcattctttctgcttgctggcagccaggttatcagctgctctgctcaggcatctttcctcacagccaactgagacctttgaaactgtgcatcaaaatacatttgcagccccctcaagttgtttacaataaggtttatctcaatgactaatacagctgactaatacagcatgcaaaatatagcaggcaagcctactttctacctattaacaaatccacagaagaagtaccagaaaaaaaaaatgtagaaaagtaaaaaaaaatgtagaaaagtaaaactactcagggaaagagatagcaatctctcttctagaaagaattacttctaacctttcacatatagctattaaaggcactttagctgttaaagacaaatccattcaagactgaattcacaaattatatgcatttgtggaatataaagtgatatttaacccccccatcttcacccctccactcctatctggtgattaactaccatcctctcttttatctgtgactgtttaagattccacacataacaacatgagctatctgtcattctgggcctggcttgctgtcatgtaacagctacaccaaatgcaacagcagacctctcagaatggttagggatgcacatcaggccagacctatggcctactgtgctggcctttgcctttagctaagactcactggtgatttggatacacctcagtgtttgagaggcatttataattctttgtctgttcaggaagaatttttgtcacgttggataaatgttctcaaatataaaatgattgtttaacattctgctttatgcaaccgaaatttactaagctatttcctaactgctgggcattgagtagtgaattttcttgcgttcacaatctgtttgtatttacaatggcttgaaagtagccaacaaaaatgcccattaaatttaatccttattgtgagatacaaagggtcgaaatgtatttgaaggtaggacttttgggaaatactaaagttacaaggtacctgaagggtagcactctggtctgatgggtgtgtggcttcagaagaaaaaggagaccctgaggatggatgtccagtcccttccaccatgtgatgttctacaccacctcaaggctctatggactctctctccactggcaagtaagacttcaccaaatgtggtccacgaccttgaacttcccactctttcatagcttttaacccttacaagcaaattacttaacttgggagattcacttatggcaataaattgttagggggaaagaaaggaggggggtataaattcccaaagtattatcaggtctgagtaagtacaaaatgattttcagaaagttgttttttttttttttaaatcaatatctatatagttctaaaattgccttagtaaagttaggcaaacagaagagtggcaacaatttaaagttcactgtgagcagctcaaacagtcttcttatagacctttctttctaggcaatggctgcccgtcatcttctcaccacacctcaaaacccacaaccaaaacctccaaactcaattttagtacgatgtgtcccccctgtcttaacagctaacactcaagtcagaagttatcatctccaaatgacttttctcagcctcacagtgcacaggccccacccacccattatggctaaagagtactgaagggcttgctactgaggaatactgatgctagattgttgctgtctccccctaaggtctccccaaccctcctctgccctgctagtaattctaggtacaacttccatttgtatcactttccaacctacatttctgtaagaacaacaacaaaattgatgctaggcatgctgttgctttggtttttcatggagactatctgccctggccgtgggggaggtgagctctatttacttattacttattagtaagttgtatttcctcagataggtaattgcacagactgggatgaaaggaagcaaattccttaaccccgagtgatctagttatcttcagagctgccagaaacaaggcactttgggaaattcttaaagggtttttcagctgagggggtgtagcttcatgaggtacaactcctagaaatgctccctcacacacacagttaggaaagaaacaaaacaagacagacaaaaacatgggggttgggggtggagtgctgggcattttaccagagctgaaagcagcttgattttatgatgctataattggggtaacagctatcatggaaactacatgctaaggcccactagctatttggtcattttgtagcctccttctagagcagccatccaagctcccttattcacataatgctcatgtgtctcattggccaaacagagaaactttgatggcaatctgcttttaaggaatgtcttcaaactccagattctttggtatattcaggagccaaaaggcatttctttctctgtgacctttaacctaagtcttctattcactgtaacattcagtgtaaaaccaagctctccaaaatgtgctaggagtctagaacaggactagttgtcagaactgactgtgatgatgaaaagacttctagccatacactctaatacagtacactagcaacaggtggtggagaacttgatatatggctagtgagactgagcaactcaattctaacttccaattaatttatgtttctatctgtccagatacgagttagtggctgcagtatagactcttcaagaccagactcaaaaaaaaaaaaaaaaaaaaatgctggaaagcaacacaaagcttgctatacccctcacctctaagtggcattttaaaaaccatagtatttatgctacactacttttccagaagtttggagtatttcacacagacagtacatacaaataaagaaacatttcaatgaaaattcccccaaactcacattcaaccgttaaagagagatgaaagcatgtcacaactagaaaatgcacatagcatccttttctatactacaacactcaagacgagttctaggtcaaaggtcctctcccccaagctaagggcccaacccaatacctaataataagcaccaattcttggcttcaatatattaaaactgaatacaattacgtaagtttaactaagtctactatatgtccagtgtttcccaaagtttctacatttttcaaaagtaaaatgtgccactaacaaaataacccctccttctgagtttaattagtaaattatttcagcaaaatttatgtctcaagacagtctctcgtgagcctagaagtgtagctaagcagtaatgctcccaactggaaaactgcagaccttcagttcctcacgactgccacaatgtaaccagaagatcctaattaactactcaatttaaaccagtaacaaagtaatgtaaccactatctaaaactggagccggctgcttaggagtctctctctctttttttctactctgttttattcgttaaaaatagagcttccactacattgccaagagatgtgacatataaataagactcagttcttgcccttgagggggaggggggcccacagctgggcaaaagaattacatatttaaacaactacaatactattagcacgagggtcccatcttcgatggtttgacctgcacaagaggtcatgccgaatttctggttcgaatcacaggctcagaatatagctgcctatggaatctatcacttaccagaataaatgaatttattcgttgcccccaaatccaggtgcacgaagaccctctcagacctgcacttgcacactctgcctaggctatccgaacacctatctagacgaaacgttgaagttaggaagttggattacgaatggcaagcgtacttaggggtcctacaaccacgcctagcccacgaaaggaattccatactgactcgcggactacaggaagaacataaagccagctccgggtgcctgctctctttcccttagcaagctgcacattttggaattccgggatcacgtctacccttcaccatccggcgagagccactctagcagcacccttcagacctctacaaaagtgcacgctctttccgggcggctccggggaaagtgggaagccgtcccctaggagcgcgcgcaggtgaccgtgggctccgcgaagccgccacgaggctgcgggaccggctccgggcgcgccttacccgtagtagcggaacgcgttgatgaccttccagaagtgctcgcgctccagccgctcctcgtcctcggcagtgctgcgcgcgggggccccggcaggcgcggccgagcccaaacgcccggcggagaactgcacctccacctcctcgctgcgcccgccgtcctgggccggctgagccgcgggcggagcgcgccgccgtcgctgcatcgccgccgcggcccacgatctgacccgcctgcgtctcaccgcgcccgactgcttggtggcggacggccgggcctcctctagacggcgccagccgcggccacggcccccgctcgcggcgcgccccgcccccgccgccctcaggcctccattcgcgctgcgctccgccagggtttcgggactcgcggactcggcgcgcacgcgctgacaacgaggccaaagccgcgcgccgccgcccgcgctcattcgctgcccggcttccgctacgacgcgctgacgtgcggtgacgcgtacagggcggggcttagggccaggtgggaggagggccccctttgggggcgtggcttgagcggagggcacctgtgagggccgagtgggcggggccacgagcctgactggcgggcgggagtagggcgggctctgaggctttcggaagcgagaggaaagggaaaggaaaagtaggtttccagaaattggtttcgaatgttttaactttagagactgaaaaagggaaggccttacgtttccccttttaaactcatttgattttaaggggattccctttaagcatcccaggagctgggaggcacaatcaccagtggttagctttaaaaatgtttctttttatttatatgtatgtggggtgggggtaatgccacgtgtgtgggagtgcttacagaggccagaagaggcctttgaacctccctggagctcaagttacaagcaaatgtggtttctgggaaccacactactaccttggggagaagagtaagcattaccaactgctgagccatctctccaaccccttattttttttaatggaaacgttacctctattgatagtttaggattaccagagacaactctaaaactaggggcaacaagttcccaaacaatgaagtgtaaaatttcagcacaccagctaataaccttcaccagcatcctgtcctttggcactatcttccagcctcttaacccttctctaggatagccgtatcatcttgggttccagaaaactcttcttctacgctctcacccacatacaaaggtatgcttggcaaacaccatatcaaacttgtagtctaggggagcctgagtctccacggtatctatgatcttgcctagaatgcacacagctcattttgtcttctctaggtctccactaggtcatggtcatatatagccagagggaagtgatgtgagggtagggtatcaggttggtctgcaattctgtgggataaatatttagggctccatcaaatctgagaaaggcagtgttggaaacaccattgcctggtgaggtggttctgatcagtgtaggttgggtcttggttatcatggtttctctgacagatgtttcatatctgccacgaagacaattcagagtgcttaaggaaagacgggtggtgattaatggaaaactctcagttgccaaaatcaagaatgtcatcccatcaccagggagatgaacaaaatcaaatcaatgtttccaaacaaggctttggaaaagatgaaacaagccctaaaaacttgggagctggttagtcatcttgtaaattcagtccacaatgacattaatgatgacctgcttgcccatggtgttgtgtctactggcatagtcactggcaccatcttccttgcctgtgatgagctactcagggtggaaaagctagcagtaggtattagtgtgaacttcatccacgactgtgagtgcctgtctccccaaataaagtgaataaggtctcctgagtggtggtcctgtcacttggtatcttttaattaggctggataccatgttctaggcagtagagctcccagcaggcattgcccatctggatcttggcactcaaaatctgagcattgtaacactccatggcagtagaggaaattggtggatagtgtttcagtggtgtgtgtgtgtgtgtgtgtgtgtgtgtgtgtgtgtgtgtgtgtgtgtgtgtgtaagggtatgtagttgtagcgggcccctagaagttggtatgtcatcctgattgccctaaaactcagagatcccatgggggggggtgcatacctttaattccagctctagggggcagaggcaggcggatttctatatctttgtgagttcagcctggtcgacagagctagttcctggacagcacatgatacacaaagaaaccctgtctggaaaaagggaaaccaaccaaacaaacaaacaaacagaaagacttcaaagatctacctgcttttgcctcctaagtattgggattaaagattcaaaccactgcattctccttcagtctatttcttaagagtaacacactagcgtgtggttcaaacttctaatgaagaatgcaaaggagtacaaatgtaatgtctttatcgtagtcacctatatctcttctccagacacattccaccaattccttgtttgttcttccagatttcgatttaattcccgtttttcttaaacactggtgttttgaaattatgtgtaagtccttataccattagctattactaattctgcactcacacacacacacacacacacacacacacacacacacacaaacacacacacaagtaacatatgtcataatattgacatagaccagaatggcctaattgacacaatccagaatgtcatgggtaaagacaatcacttacctatttttctacttcctgggaaataaagtaaacattttgaatttctttatgtaaaggatagatactctctgttaaaatacaatgtgttaccgaggtgcttgagtgtaaacacagcagtgatttgcacatgtggaaacctagggaccacatggggccatactatgcatgcctacattttatcagtcctccttatgactctgactgtacttatattagaatatgatatacattatttacatttttcaaacactttccccctaatttattacttattacttcagttttgtgaaggaggtgacattaccttcccttaacaggtaaagaaacagattcagaggaatccattttcctgccctgaacacataaaccccaagtctgagattcttctcttattctctttctttctgtcttttttgctgttgttgttgtcatcgtcaatatccatatagtctttattttttgatattttcacattaatgatatgcattaaacttaagaatataattttctcatgaatttatgtgtactcctttttaaatttcatttttacattccaactacagttctccttcccactcttcttcaccgcccccacctccctcccatcccaccccctatccactcctccactcctcctaaagggtaagggctcccaaggggagtcacgtataccagggatagatcctggtcatattacaggggggggggcttagatagcccaagcttcacacattgtctcccacatatggagggcctaatttggtcccatggaggttccacagctgtcggtctagagttcatgagtttccatgagcttggttcagctgtttctgtagatttacctgacatgatcttgacctcccttgttcatatattctacatctggttccatcagttactgggtgaaggctctatgatgacagttggggtattcaccaatctgactacaggggaaggccagttcaggcactctctccactattgctaggagtctttctgtctttttaatcaatgtgttgtctcctattttttacacttttgagatgaaggccactaggagcttctggaaatagggtttcttcttttcacattctcacttaattctacagcttgtttagaaagttactccacttgaattatttgtagaatggacacaatatcttttttttcccactttatttgtttatttttccagacagggtttctttgtgactttggaagctgtcttggaactagctcttgtagaccagcctggtctccaactcacagtaatcagcctgcctctgcctcctgagtgctgggattaaaggcatgtgccaccatcacccagtaagatatcttttttacagtgttgctgtgataaatgcatgagatatattgacacctgtttgacttgttatcccaataaatgcgttttctttcctcttctcagagtcttttagaatacattttcaactttctttaaaaatactttcatttacagttaaagcaaccaatttatttcaagacagagagtccccaatagtctaattattcataagaaccacaggtaagggctggggagatggactcagtggttaagaacattttctgctcttgctgaggacctgagtttagttcccagaacccatgtggtggcttacaacaagctgaaaacactttttttttcttttcctgaagccttctttgacctaacttgtttgcaatgattttcccctatggacatcgtcccaaaacatgaaactaaccatgggggctagaggctatggattgttttcatcaggtcatgtccaaccaggaggtgcagtggtggtgcacgcctttaattccagcacttgggaggcagaggcaagcagatctctgtgagtttgaggctagcctggtctacagagatagttccaggacaggctccaaagctacagagaaaccctatcttggaaaaccaaaaggaaaaaaaaaaaaaaaaaagaacaaccaaaataagcagtcaatgtcatatccaggaataactaaaaaggagacctccactctcttcagttgttctacagagatgttaagtaaacttttaaagtgccttcatttgtctgctgttgatgagaatgtggagtgacaggcctgcctgttctgggaaagtgtagagaagtgtgatgtgtgatggtttccaaatcctgcctctactgagacagaaaacttgcatctgttagttacatgaagcagattcattctgtacagatgggaagcaagggtcattggaagcctggaattcattacaagctggtcctgccaagactcaggaaggctgcccagggaggctggagtctcatctgtgcatgtgtcatctatatcacagctgagagccacaggaagcagaccaccgtggctttcgtgtcctgggccatatgacacattgggctacagtaccaaggaccttcttgcttctagggcacagtaacagagatgagacttatttcaggattttgagtccccagcagtatcatcattcataagaaccataggtaagggctagaagatggctcagtgattcagagcatgttgtgttctgctcttgctgagaacctgagttcagtttccagaacccatagtggcttacaactgtctgtaacctcagttacaggggatccaatgccttcttgtgatctcttctgacatatatacactcaggcacatacacaaaaaataaaataaataaatatatacaagtgaaaaagggtggggtccaggtccatttcgggtcattctgggaactgttcagcaaaggctctgtagttcagtagttccttacaaaaccaaacacacacttaccatgaaacccagtgttcacaagcatagatgctcatccaagaaaacacatgtgtacacaaaagcaagtgtaaggtcagtacaataggctatatttattcaaacctatacatgaaaaatctaaagccaggaactaaaaagaagccaaatgttcttcagcagatgacagcaaagataacaggtaaaactgaaagaaactattttgagatgtttttctttcaagaaaatttacagtaaaaatcctacatacactttggatgctataaagtgttgaaatctcctctgacagataacatagcccattgttttgttttctctttctcttttttccccatttctgcctccctcagattttcaggatgtatggaaggaagtcagattctttgtcagcatataacacaaatggcctttagctcaagtcccagtttgagaatttctgttcctttctgttaccttctgagccaggcatggttgtacatattgcccagcattcaggaggctgagatagaaggatgctgatttacaggccaactggcacattctgcaaagacagggtctcaataattttttttttttcagagctgaggcccaacccagagccttgtgcttgttagataagcaccctacaactgagttaaatccccaaccactcaaaaaaaaaaaaaaaccttaaattgttacatatggtatgctgtatttatgtttttgaatactaagcagaacagctggtaaacatattaagaatatggttgtgagtatgaaagacaaagaacaggggctatagctatgataggcagctcaagtatgccttatggtagactctgtgctatctttgacttgtactagctggttttgcaaatagttcttcatttcagtcatgaactctaggctgaggatgtcataatttggccttaaaataatgacaatacactgtgggactggagataggtctccaggaaatgatcatagggaccttaagtagatcattatagtcaaagaaaccagtatccagaccgcaactgtgtacacacacgacatggcctcaaaacaaggtgaaacaaacaaaagcaagtgtgtctaatcttaggtattacaactataggatatgggtgtcaattgtgtgtacgcagggagaaaaagcaggaagacggcggaaggtacacactgcaaggggagggaggaggaggggggagggaggagggaggagggaggagggaggaggctagcaccaggtagagtcatcttcctgttctgttttctttccctggtcactagatcagaggggctgattcttcttcattttagaaaacttgagatcaaacattccaatctgaaaaccagggttcctgtagctgaaggaggcacagatggacattatgagaacttttgtgtcccagccataaatcagtcatttccctgtggggttggaacacatcactgttttctcagctgagcaacagagagtatctataaaaaattttctgagacaatccttacttcagtgcctcaagatattgatatgatacttggatttggtggctgatggatgatgggtgatgggagatgtcattctgtaactatgtttctcttattggttgatgagtaaagcactgttggccaataggaaagcaagacaggtgggtctaagagatgaggattctggcaagtgtaggcacagagagactcgatgtagaccgcaatggagtaagagtcccggaccttttctctggtaagataagactacatggaaatacttatatttatagaaatggttagtaattaagacagagttagccaataagaagccatagtcaagggccaacaaatttataattaatatagtgtctcatgtgttattgaggggctgaagcggctgtgggacccaggcggctggtgggaaagagtattgtaaatccccttctcatctcgtggcagctgccagacatacttctgtttctctctcctctcttctctccctttctcttgacactaagtcaacacacatttgaggcaattgtatctgtttcttctgcttttttcatccacacttggaaataactctagatttgagaaaagttgaaagagtacgtagtgcagagttttccttacctttcgcatagtgccatcttttattggtgtgtttgggttattttggtttacagttccagagaggtacagtgcatcatggcaggaggagcaggaggcagagggtcacactgaatgaaagtcaggaagcggagagtgaacaggaagtggaaccccgctataaaacttaaggcccgcctccagtgttctacttcctctagcaaggctccacccgtggttcctcaaccttccgaaacagcatcactatctggggacccagttttcaaacacatgagcttatagaaggcatttcacattcaaatcacagcattttgtccctgagcccctacagcctcatggctatctcataatccaaaatgaactgttccaatttccaatgtccccgcagtcgtcaatagccccaacactattcaaaagtctaaagactcttctgagactcaacaatttcttaattgttatcccttatagaattcaagaaacacattatatccttccaaaatgcaacggcagttttcacccagtatgctctaatgctaatacatgatgatagcacaatgatcaaaacaagaaactagtacaatagaactaagctacaaagtttacttccagtcaagctatttccccattactgttacagtgttccagaatccaatccaggtttggcattgtcatgtctctctagtgttctccagttagggacaggttctcagcctttctttttctttcttggctatgacactctggaagaagactagttgattccatggggtgactacagtttaagtttatctgaggtcttctcatgattagattgaaggtacacattttcagcagctgtactacagaagtgacaaccttctcagtgagtacaggagacagtgtggtgccagcgatgacaggtttccaatcaagcaagaagcacaaagcaccctacaatctagtaacaataatcttgcaactaggactgacctggcagtagattgtcaatggaactatttgtgaagaggctgttgttattgattaggcaagggttgattgataaacaatggttacctggtccaaggctggaggacaggggtgaaagttggaatatgagacttctaaggtaaaaattaagggatttggggaaggttctgtatgtgaagagacaggaattggggagaactgagacattaggtagattgattcctttaccaattgaggcccactctcacatcagctcacatcctagagaaaatatactgtccaccccacccactcggttttacagaacgaaactgattacaatgagtataacgagaagctttgaagggggaaagaaacataatttaaaaaaccccaagggttataagtgactcacctctagacatagtgacaggcttagatgtgtctaataaacttttaagggctttagcacttgctgggcctcttagatgttccaggatgatttcataacatgctatttgatcttgagaacagttttaggtctgtaggatggagtcaagagggttgggattgaaagatggatctaataatagcaaatactcgccaggtgccaggcatttgatgacactctatatcaaactgcaatcaatttcatcaggcacaacagaatcatttcaattttttactacattcaagtttctttaggcttggagaggtgagcagcacaaatgtgctcaagttccaaagttaaatgcaaacacagggttatctttctctgttctatgcaatttctattcacttctaggagtgtttcattgcaaacataatgtccaggcagtacacatctctattaatgcctctagcaggttagttattcttctaacttccagtttcatctgaatgtgaagcaaatcgtggtttgcaactgcagcaagtaagcattacttcttcatgtgatttgtgatttactgtaagcactaatctagcaataatctgagataatcttatttaagtgttaactgtactttcaggtggcttctgtggtactacaacacaagcacagaatattaaaacatgggaaggtatctctgagatcttcttagattttaactattaaactttttaatagtgtacaaaatgggtagctaaggatggtgctggtgtaattgaaatgtgggttcaggaagctgggtgtcttagtcactgttcaattgctgtgaagagacaccatgaccaagggaactcttgtgaaagaaagcatttaattgggggtttaattacagtttcagatacttactccattaacaccatggcagaaagcatgggagcagacatgtatggcactggagtggtatctgagagctactgtatcctggtctggaggcagaggtgggttccagtgtgggggaggagggagggagggaggatataagagagggagagagagagagagagagagagagagagagagagagagagaggaggagggggagggctggcttgggcttttgaaaactcaaagcccacccccagtgacacattttctccaacgagcccatacctgctaatcctactaatcctttggtcaactccctgatgactaagcattcaaatatatgagcatatgggggccattcttagtcaaaccaccacactgggccagagagtttagggactggtctgacctcacaagacaggatagcatagtagttaagactgtcactacttgaaccataaaagttggatttccaatctgtctcctatgagcgatggaagcatgactttgggtagttattgtaccatttacagtctcataattatgtgtttgtttaaacattaaacaatgtattctacccttcatacagttaaaatatgacttgtagaatatataaagcaaacatgtttcaaagattcatttaagaaattaataatctggcaagatagtaaaggtggctcaaagagaattagagacagaatttgtggtgtctctaagaaaagtactggaataacatcactttaatataaatctggtccctgtattagagcaataaactgagcttttagaattattgtttctaccagaaaaataatttacatttctgccagccaaattaattttgcgtctttatcagctgttttcaagagaggagtgatttttgtccccaggggacaatggcaatgggaaacatgttagagttacaacttggggtggggttgaggggtgtagaagaaagggatagttgtctcttcagtgtgtagaacacagcccttagaaaatctctctagattcaaatgtcagcagggctgaggagagaaaacctggtgatgtttgtgtaggttaacatttacacttacaagatcttaactattctacttaggagagaattccagtcaaagagtgccagcagagacttggataatctttggccgagtcctaaccctgaagggacaggaaaaaacaaaacaaaacaacacccttttcttttttttcaggctttagagtatggttcttcccttcctttttttgtgtttttgaggtagggagggtatcattgcctagtccaggcttgcctgaaactggaaattctgtatcagccttctaaatgctgggattacaggcactgtcaacagccaaaatagaattttgtttgcttattttttatttttattttttgtttgttgaatttctgttcttgagagtttgaccccggggctgacttcaaactcagtatgtggccaaggctggccttgaactcctgatcttcctggccccaccctgacctactgtgtgccatcaagtcaggcagcacattttcttgctagcatttgacactgtgtagataggaaaaatgctcagtaaaggttattattataaaatttcaggccgggtgttggtggcccatgcctttaatcccagcacttaggaggcagaggcaggcagatctctgtgagtttgaggccagcttggtctacagagccgagttccaggacaggctccaaaacaatacagagaaaccctgtcttggaaaatagaaaaacaaacaaacaaaaaatttcaggttctatgtaggtgtctgtatacttgtgtgataaacaaaatcttcagcatacttggaatctttcaacaacaccatacaatattactatcggaaatgattttactgtcagatgatttcttcatgatcactttgaaatgttaagaaaaatcaatataatcttcaaaataatgcattttgtgtttaaaaaggcaaaccatatcttaaaagtaacatgaaatacagactcaaaaaacccggcctctcatttttcccaaggactgtactgtcaaatggagaatatccaagatctagaaagaaaacccactacatatctgatgtggaaaagttctggaaatgcaaaatcacagagttgcagttttgtggcacattaattggccagcttattgattgatagggctggggatgttgtatactaggcaagtctctatcactgaactgtatctaggctctgtctggagcacttctgattgtctaacacatttttttttcttatgggcaaatgatatatgcataatatctcagaaataagaaatggaaagttaaaaaaatacagggaatgaagatgcatagttttccaaattcctctcctataattagttgaacagcgtgcccaatagttgtattagtctaagtccatctggcacatataataatgaaaactagaaacttgtatataaagaattgagtacattacttacataaaatcaataattattttaagaattaataaatatgcttatatacatgtaatatataaaatacataaatgattgaaatgtttaaaatagatacatgtttaaagaaggtacaatgtaaaacaataggatatgcacataacttcataagtacaagtagatattgaaaggcccgctgcctctctgtccccccccccctatgccaatgctgggtgttctctctggagcagccgggatgggctgggaagaacagttgactgagggcagcgcggcggggactgagcagggcagggctaggatgcggccaggggctggagagtgcagcgcgggcgatgctgcttgtccgggagctgcgagctgcgagcagggagccacctccaaggccaagggcggagctgccctgcttccccttcatcccgctgtccctgcccccgccggcctccacttcccccgcccccacacccccccaatggggagccttcatcccaaggtcagccatctggaccggcaaaagataaaggccatttcgcctgactattacggtgcctttttcccctataaaaggactccccttccggggctcggggcttagcctaccaaaagctaagccccggggtaccagcgctactaataaaccctcttgctcttgcatccaaagttcgtggtttcgctgattcctgggtgtgggtctccttctacgaaagtacctcttctgaggtctttcaatatttattatataagcaagaaatcatcaaaaaaattggggatatttatccagtagctgatagaagcagaagcagagacccacaactaagcactgagccaaactcctggaatccagttgtagagagggaggagtgttgagcaaaggggtcaagaccatgctggggaaacccatagagacaactgacctgaccaagtgagacctcacagaccccagtctgacagctggagaaacactatccctgatgttgtgtaggtcatgctgctttgactagagcctctgaactactattaaaaatttaaatgaatttctttatgtacccagaagtggtgagcaatgcctaccttgccttttccatatctctatttccttcactttggaccattgacagcatattgaaggatcagcctgtgccacaaacccaaggtcagcatagtcagtatcatggagctcacaggaactcatcattgtgccttgccctatggctaacctcattagctggctagcttccctgactaggccaaaaatccagaacagaaagctcattttagtaggctatttctctgtggttcgttgtaaaatggaaagtctatgtccatgctggtgtactgtggagtcatggcctggccctgctcttgccattagctagctgtgtggagtagtctacctcactagctctggtttcagcatccatactgcgccagaatctggacagatgttaacaatctaacactttatgattccagataataaacaagctgactcttaaaacgtaaactggtacctaaaagggtaaagcttgaatcttaaccattggtgagagaccgtatgtcttaatgcacagtctttaatcagcctttgctacagtcatcttgtctttatttctgtgtgtgacgaatacatgtgcatgtgtctgcatatgtgtacatatgtatgcacgtgaatacgcacttggatacaaggccagagattgacaatgggaatctttattttttgagacaggatctctcactgcacctagagcccatcaattcagttagagtggcagaccagcgactcctaaggattgatccttttgtctctgcctctccagccctcagaatgcaggcaagtgccactacacatgggtttttccatgcgagtactaggaatcccaactcaggtcctcatgtttatgtggcaagtattgccaactgggagcctaaacctttaacagctgagctacttctccagtcctactcttgtcttttccatcttctgccatgtttaatagtaagtatacgtcttcaggcagcacatcctacagggattgagaaagtgagatttttagcagacttgttccttgtcagtacaaagagcagacgcttgcttcatgtatctttctggattcagaaagatcactaactgataaagggcaactgtaatatgaaatgatacatacagaaaccaagcactggaattgtttattttaaattcctgacatttcttactgataatagtaagcaaaagacggtagtttccccccccccaaacttagtacaatgtttccatttttttctttcttttttttgggggggaaagaagggggggtttccagacagggtttctctgtggctttggaggctgaactggaactagcttttatagaccaggctggtctcaaacacagagagatatgcctgcctctgcctcctgagtgctgggattaaaggcgtgtaccaccaccgcccagccaatgttttcatttttaatgactgttcagttcccttacatattcctccacaaggcagcccttctctgattaagtcttcaatgctgaaacagcaaaaaatttggaataacgattctctatcacacctcatggtggaggggcatctcagaaatccttaataagcttgaatgatctacatacataaaatgtacactcaatgtacatgacaatatatattataggaaggcatggtggggtacacctttaatcccagtactcagaaggcagaggcaggtggatctctatgagttccaaaccagcctggtctacataatgatatccatgtcagccaaggttgcatagtgagagactatgtctcaaaatcaaacaaaaatatatattacgttttcaacctaaaagcaataaaatctactatgataataacaacacaaatgacaatcactcaattttgacaggatcttgactagggagaagctgtggcatatattttcagtttctgtttcaccatcctttcttgctaaaatatccttgctctgtcctatggcaatgttccaaatgaggtaacaaatgaggcaagactggcatgaacttatcattgtggcatcctcttcccagccccccaggcagtgagaagtgaccatatatcccagttctgacagggattgagggcaagaaagctagaccagagagggccttggaggccacaagggggatcttgaaagttaccctttaattaaggataattaaaatcaggactttaaacagcttggccaaaaatatgcaggtagctgctaatttgagcccaggtttggttttgtttatgttttgtattttttgtattgtatacaaccaaaaacactagttatcaatgaatgttggaaataaataacaactgaccagatgagtcaatataactataactatacatacatacacaacacatacatacatacatatgaatgtatatacacatacatacatatgaattgagaagattgtgggtaactattttattattaataaacaaatttcatatataaattaggactggtctacacatatacataattttaatcccaacactgaaagaggcattaagaaattacacaattcccacccactgcccacgcctttcaaaaaaaggccttggttttacatatgactgaagactttgtaattcagagtgttggtttcagaaaaccaagtgaaatacaccaaatccttctgtggataaaagaaatctcatcagagagacacctgatattggacaagcagaagaaaacccactactacaaagcacaaagtctccagatgctgcagtgacttctgacccagtcaaagtgagacccttatattgggtaatggtgctggttgcaggtggggagcattgctatgtgattgcagacagcatttaccaaattaaaaattataatcgatacaaacacaatgaaaactagaaaaaaaccatgcatagtgtttgagtgtgtgaagacaacataaatatgcagaataacatggagacacaacttcatgcacaaatgcagaaacacacacaacacaatatgcattgtggactagacagcaatctttttctcatgctaggtcctagtcagaaaaatctgacctccgttcttatagaggaactgaccctttgtgcgtgagctgtgctgtgccttcagcagagtgagagcaagccatcttgtattcatgagaggttcctgtccaatagcatgggcacacactgctctacaccacattgtgaaaagtgtgataaaatgaacaaaaatacagaagagttgtcactgtcctgcagggcacactgcaacctggttaatgttcttcagcacatccctccatgtttctttgtttttttccaagatagggttttctgtctttaagtttcttaatccatcgcaggaggacttgctgcattccatcgttgcgctgttactcacaaaccttaggaataaagaaaaaaatatgagtactccaagtcttatttgattaggtcttcacacctaatacctaacaatgttaagattaaaaggattttgaggcaaaaattctgctttctccgtaaagaaccacattgaatacaaatcccattgttttaatccttgcatcaaattttaagcctgtctttagaaattagacaacctcaacagtagatgaagactcattattgagaacagtgactatttaatgttaagccacagacaggacatatttatccctactctgcctcccaaggctcaaaggacatttcagaagagggggcagaagggactgagagctggaacatcaggaggagagtgacacactatcttctggatttgaaatgactgtggtaccagtgaactcactgaagctatggttttatgcacaagacctgcccaagatggggtccaccaatactatgtcatgatagagaggggctcctgagaccccatttctcttgaactatttgtggttaattgtgtcttgaggaggggaagctgttttcctcagtggtgtaaccattggtaagttgactatgttctggtaaacactgcctacctatgctcacacaaccctaattaaactcagtggttcacaagcaacaacgataacacaacaaattaacaaccaaagtaaacatagaaaaaaatgacatgaaaataggagggtgatgtattggaaagaaggggttcaatgggagtggcagggtgatgagagagcattatgggtgatggaaatgaccaagcacattataaatgtgtacataatcatcaaacaatgaaaactagaaagcccagatgcccaatatcatttacagctggcatagatacttgactataggaagagaaaattttgaggaccagaagttcatcaaagggcagctgcctgcaggcatgctttttgtttgagtgttgtctggatatgggaaagaagtatcctaaccttcaatccagtgttgtaaatgaaggaggcttaggtgaactgttcagaaactcaagaaaaaacctgatgcattcttactattcagttttgtcagagaaaacatattttctcaagtatagtatttaattgctgaaataaatgtaaaaatgtaaaatgtaaaataaaagcaaaatgtataaattattgcactctgtccacacaagtactagttctgagaccttattctaagaatgtaattaaaaaataaaaccaacagtatgcatagactctgtgtgtgtgtgtgtgtgagagagagagagagagagagaaagagagagagagacagacagacagacagtcagacagacagacagacagacatatagagaggtatcatggggattaaacccagggcctcgtgtatgttaggcaaccactgtgtggtggttagttttatgtcaatttgatagaagctagagttatttgaaaggagagagcttccattgagaaaatgtcgccataagatcgagcttcaggcagtaggacaatttcttaattaatgattgatgtaagagggcccagcccattgtgggtatagccattcatggtggacctgggttctataagaaagcaggctgaacaagccatgatgagcaaggcagtaagcacccctccatggcctctgcatcagctccagcctccaggttcctgtcttgtgtgagttcctgtccccactgctcttatctagggacaaattgcttatcttgtatttgcaaaggacaatgcactttgaacactaaagtacacacaactcaaaactttgtagaaactttgtaaaacctatagctaaacacaactctagtcaaataatcagtgaatcttgacataccattaatgctaacaactgctcctgatactgctctactgaaaaattgctcaacaaaaaacctcatctggcagctccaatttaggagcacctcataacctcatgaagacttgagtgttatgaaaggttcataaaccctttcttccctaactaaggcacactacatacaacacatatagtttttttttttttgactaggtattgatgttaccacttgcagtaacagaagtaagtatccaagacaattagaaaaaagctaaatgatgttatgggaactggggctatgtggcagattgaataggaatggcccccatagactcatgtgtttggatgcttggcccatcggtagtggcactattaggaggcgtgaccttgttggaggaagtgtgccactgtgggggtgagctttgtggtctcatatgctcaaactatgcccagtgtgttacacagtctccatctgctgcctgcagatcaagatgtataactctcatgttgtggaatattcctctacactgtgtgggagatatgtcagtgtgattggcttaacaaaaagttgaatggccaatagttaggcaggaattccatatacagaggatgctgggaagaagggcagagaagttagccagatgtggaacaagtcagacacacaaaatgggatagaggtaaaaagccacatggtagaatgcagatcaataaaaatatgggttatttaagttataagagcaagttagaaacaagcctaagctatcagctgaactttcatcgaaagtctccataggatttgaaagctggctggtgggacagagaaagactagatacactcttagcttctccagcaccatgtctgcctgcacattgccatgtctcaccatgatgataatggactaacgctctgaaattgcaagctagcccaattaaatgttttcctttacaagagtagctgtggtcatggtgtctcttcacagcaataaaaccgtaactaagacaggctattatgccagatagttacagtagtattatttgctaggtagaaattatatttcaaattcaatttaggaaaatacaaatacatgataataaaaattaatttttccatttcttttctttctttctttctttttcttttttttttttttttggtttttcgagacagggtttccctatgtagctttggagcctgtcctagaactagctcttgtagaccaggctaatctcggacttacagagatctgtcttccaagtgctggaaataaaggcgtgcaccaccatcacccaactgatttttccattttctatctttccatctggtatcagctatgggatgtctttgttctatactaaagtatcaatgccaagttttagatttcatgctggtgtataaaacaagaactcactgggctggagagatggcttggtggttaagagcactgactgcttttctagaagatgagggctcaatttccagcacccacatagcagctcacaacgctgtaattccagttccaagggacctgacactcatattgcaaaagaccaatgcacataaaataaaaataaataattttttaaaaagaaagaaataaaaaaggaactcatccttcgatcttctaatggtagtgatacttagcttcattatataacatcaacaaagctgcatgaatacggacaccaacaaacataccaaaacccataaatcagcatggctggttacccaacgtgttcacagcatcctcctataaaagagggattgataatgaacatgattataatttcttccctttagaatcaatgtttttataatgatacaaaaacaaaagtttttaaagggacctagatggtcctggtgaataagttgctttgttacattaacattgggaaatgattacattttacttccagcttcagattttattaggactacattatacatatactctatatagacttacagaggtggtttgaaagaaaatagcccccaaagggagtggcagtattaggaggtatgaatttgttgatacaggtatgccttgttggaagaagtgtgtcactgtgggggtaggttttgaggtttcctatgctcgagctatacccagtgacaaagttcacttcctgttgcagaactctcagttccttctcaagcaggatgtctgcctgaatgcagccatgttcctccatgatgataatggactaaacctctgaaacagtaagtcacccctaagtaaatgttttcctttataagagttgcaatggtcatggtgttcttcacagcaataactttcctgtgttatttacctttttatttatgtatcaattttattaccttatcataatcatgactgtatattcttataatgaagaatttgctgaacagggttacacaaagtgaaaaaacccagagtcaccatttgacaccttagaaaggtcaccctggtgttctgaggctcaaggctaaagcaggctatgctgaggatccttctggctggaagaacttggagaggtgctgggttactatatatagcacagtaatttatctgggcaatggaaggccaccatcaatcttggaggcaagcaaagtggatctgtttccaagttttatatcttctagtgtttctattattattattattttacctctatcttgcacacacacacatttgagtcccatacacagacatatactatcttgtgggttcacagcatctgctgcaacatgccagctgttcttcgcccttttgggcagatggcaaaagaaggatttggggtgacatgggggtataatgcatctgaggaacatgaccaaagtatcctctgtctttattgtcagacagatcctaaggcttaaactccagtatttgacttagtcactaaaagggacctgtgtctatgctctggccattattggaaaaacagatgttagtatctgggcactagaacatcttgagccctctcactgggccagagagtatcttgtctttctcagataagtagttctggctcagggttgtcatttataaacgctgagcaactcacatcacccaccattcttcatctacttatgttggtggactgggccgcattatgggaggcctaccttccatcagaataacagatggcaggtgggatggtagcgtggggcagaaggggtggggtgtcagggtgggatattagggtggggtatcagggtagggtggcagggtgggatattagggtggggtatcagggtagggtggcagacctaccctgataaggtctggataaggattattggtaaggattattagttctatttatatgaataaaacttaacatggtcctacaatttcctcaaagggcttcctgcctatgtaaagggctgaccttacaaccaggaagtcaggatcaatgggaggcccagatggcttgcatggctagtcagagaggaattgctgaagagagggtaagcttaattcttactgagtgactaacatgtgggctacagcagggttttctcaccctaaaccctgctacattcttccctgctgttgaggctaatactgttttctcttaagccagctgaccatgacatttgatctgtgttaaccacaagaatctttttcctttttttttttttttttttttttgagataggatgtcactctatagcttaagttgtctttgaactcatgactctctttcctgatctatttgagtgctgcaacagaggcatgtactatcagttcaacataggaatcatttttttttttttaagatttgtctttattaggctaggtgtggtggcatatgcctttcatcccagcactatggaaggaagaagctggtgaatctttgtgagttcaaggccggcctgtactatacagctagttctaagccagttggagccacatagtgagatctttactcaaaaaaaaatgtttttaattattatttgcatatgtgtgtgatggggggaagaagagggaagggagggagaaaggaagggataggggtacacatgtatgtgggtgccagcaggggtcagaagaaagtgtcagatcttttggagctagagttataggcagctgggagctgcccaatgtgggtgctgggtactgaaccccagtcctctgcaagagtagcaagtgttcttaacacagccatttctctagctccctcctattttaattcttgtaattcaaatctcgctgctagatctagagttctgtcctcccagaatggtattccttctttgtgtttctttccactttctctatggaaaaaaatttaaaaatcaggtctcaggtgggaccttcaaccatgatggggtataggatttagttatggccaatcacagtgtgccattttctggccaaagtgatagctttagcaagtcatgtgatccaagaaagatcaatgcaaaaatcttccctaggtcatttcagctgagttcaattgaaaaattacttaaaaaaattgttgaagtctgggtatacaacttagtgacgctcagcacatatatgaagtctgggtatataatctctatcagcacatgtatgaagagtgggtatataacctagtggtgcccagcacatgtatgaagtgtgggtatataacctagtgatactcagaacatgtatgaagcctgggtatataacttagtgatgcacagcatatgcatgaaggtctgggtttaatccctagcaccacaaaaacaaacctgtataaaataagtaatttgacatctaggaagtagtaaagacaatgcaggaacatccagctccccatgtatccactgatggcaatcttggaaaggttaagctaccatttcacattggatgctgatagcagattatcatgtttgtgggtagagtgagtctgatttaaaaataaactcacacagaattatggcagagccctgagaatactattctagccccttactccagctgagccaaaagctatggccatctctggattttcttttcattggagccagatttaggtggtcttctacatctttcaggaaagttgtatttgaaaaacaaaaactccagcctggtctacagagctagttccaggacagccaaggctacacaaagaaaccatttctcaaaaacaaaacaaaacagaacaaacaaaaaacaaacaaaaacaaagaagaaaattaacccccccccaacccaaaaactttatgaaaaacatttaagagaaaaaagaaaaaggggagttccagatatatgaaaaccatttctggcccattttgttagcctcctgctaggaatttaaagtaaataacatacaaaccattaagagatgcaacagagctgggcagtggtggcatatgcatgcctttaatcccagcactcgggaggcagagcaggcagatctctgtgagttcgagaccagcctggtctacaagagctggttccaggacagcctccaaagccacagagaaaccctgtctcaaaaaaccaaaggtggggaaaaaaaaagagatgcaacagaagtaagtatttccaaatctaaacctatctgataaacaaaatgatcatgatccagacaggcactgtatcgctggctcagctattttcaagcaaaggatgaatgaagacagtctttccttgttggtatttgtgcacactgacactggaatgcaatgaactgttctcaagattctttttcctccaccatccgatttgatagaacaatatttaccagtttgcttctctaattcttgcttgatatcttcaaacacttgggaaaggaggtcttcttcagatcttgttccatctaggtaaactaagaagtgagaaatagcagttcaaatatgctgcagaattatcctgctatacattgtgaaactgtgttgctcttgttaataaaaagctgattggctggtggctaggcaggatttttgagacagacaggatgctaggaagaggaggggtggagtccgaggagtggccagccagacagaaaaagcaatatggcaagttcaaaggtgaggtaaaagccacgagtttcggggtagcacatagaagaatagaaatgggttaacttaagctgtaagagttagttagtaataagcccgatctattggctgagcatatataattaatattaagtctctgtatccattatttgggaatggggtcagggggcaggaaagaaaagtccagcttattagtaaaggatgcttcggcatttctttaaaagaccaatagctttcaccaaagaacctagaactatgacctaaggaagaagggagggagggaaagaatgaaaagagaaagagagagaggataagcattgtccatatggcatgcaccgtgtacctatttcttctgcattgggacactccctcctagagggaggaaggaggctcatcacactccaaagtaaatgaactaattggctcattgagctcctgagagttagatttaaaaggccccttccaaaggttaaatcagcagaaaccaactgccagagacagaggactctcccatgcccagagcagccagaaggttgtacaggcagctcgctttgaggaggtgttgtcatggtgacatgcaattgtctttgagtcaccatgcttctttaagtaatcccaataaactcactagctcactgagctggacgtgggtagtttctctggtttgttcttggtgcctgactgacacataatacatatcaggagactgcaggggtgcctggcccaaagaggagcaatttgaaatgcatgtccaactgggatcatctgtgaagcttttaaactatgtgtcagtctggactttacgacatactatagaagtcagaagttacgtattttcaataaagcaggcatgaacacttttgtagaaaaagaagttaacctgggttaaagaaaaaaaggaccctggagtcgtaaaacagcaaggatgaggaagtctgaagagagttgcctgctaggaagtgtgagtggtggaggaaggaacagaacagcacaggagatgaaattttggagaaagggtgtgccttggtgtctttattgattttatctcaaagaaccggaagccatggaccagctgcttttaaacagggtgtcttatatatttttttttctggtgttgtgataaaacactctaactaaaagtaacttggggaagaaagggtttatttggcatacactttgagatcacagttcactgagggaagtcaggacagggactcaaggtgagagcctgtcacacgaaccatggaagatgctgcttactggcttgctctctggatcactcagctagctttcccatacagcccaggcccaacttcgtatggtggcactgctcacaatgaatggggccctctcacatcaatcattagacaggcttgccagtctgtcacagagatggccacaggctgatctaatctaggtgattcctcaactgagactccctcagatgactccaggctgtgagaatttgacagctgacattaactaggccaaagaacaaggacaaagttagacttggactttagatggagggaacaaagggtgtaagaggatgtttctcctgtacggcacagaagctgctgggacagcacaacccaacaacaactctgacatggactctgtgcccttctgcacagatctgagtccttccctggagccaacaagttccatcctataggaatgagtctccttggctctgaaaagtatgccagtctgattcttctctcttgtccaacagactcatgccaccgctccccctccccaccccacgtgagcactgtacaaacactccagtgacagtctcttagctcgaggcccaagtattcatattgcctccaaattggcacattgtctctcaggtacctgaatcttatttcctgcaaaacacatgtgtagtccttccttacatatctacaactccttcatgtctcaaatatcaccggctagttccttagacacttttatgccccagttctactgagtacttgtgttcaaaactgcaacctctaaatgtaccctttggatcaggagagatcttgctgaaaagaaaatgtgccgggcgttggcggcgcacgcctttaatcccagcactcgggaggcagaggcaggcgtatctctgtgagttcaagggcagcctggtctccagagcgagtgccaggataggctccaaagctacacagagaaaccctgtctcgaaaaccaaaaaaaaaaaaaaaaaaaaaaaaaaaaaaaaaaaaaaaaagaaaagaaaagaaaatgtatcaatcatgactgtgtttagaggctgtctgtagagagcttcccgattctcctaggacattcccttagcattagagggcctggcccttggcagcagcaacagcacatcctccctctgcttttctcttctaaaacaaaatggcctcttttaggtattgcttatgccttcctgtccctaggtcttttctctgttcttcccatggtctggatgacagtcattcccccaccccaaggcgagctaaactcatatgagtttagtgatagacagctttctcagggaccttgaggtaggcagtctccctggtacttaatatctgtgcttacctggagaaaagacttgtttgtaatgcacacacttataatgtgtttcctggtgaaacctcagctgggtaagagtagagactggatctgcctccgtcaccttcaaccaccataggcaacatcaggcaagggtggttcaatgaaagaccaaatggaatctggcaagaggtacaagaaccaccaggagaaaaagaaaccagcaaggaccagttgtaggagaggggaacccagagattgcctgagcatatctttaagaactccttgagagaaaatattttccaagtaatcctttctgtgctttgacataaatgagaagtaaaaggccttaagagaaatggggaaggtacttaccaatattccaagtgatggtgttcatttcttgtctgtgctttaggtacatgggccacacatggccatcaaagtaccctggagggtcaggaggctcatatacccttgtactagaaaaacatgcaggaaacttgatgttcatacaaaattatgattgacaaaatgaatcatggtcaagataatgtgaaaatcattcatgttaactctaaagaggaactcagactatttttttttaattcagttgtactaagaaaggtagcaaaatggatttggttctctaatttaaacaataaccccgtaactcattaatgttcataattatctcttctcagtctcctgtgttttagaaaagaattatggaacacgtacaagaaaaaataaggagtgaaatatggacagactgacttcctctcctatctagctggtggtctctgcagcgacagcagagcataggcatgagggtgaggaggaaggtgcctgacaggatgtcaccagcccttcttagagaagttactgtacactactccaggtgatgagcacttttagaaaaacgtttgacttatgagttaaggcttgttcaataatgtcacttttcttgttttccctgtatttcatcttttggataccaacgcacaaagatggttttgaaacgtacctccgcctcctcttacattcttcatatggaatggtcaggaagtaacttctgttccatatggtgtccagtggcctaagataacaacacacttggttcacaaggctctctctcccctacccctgcattccttcaggttggtattagagtgggaaggcttacttataattaaagagaaggaaaccttcaataattaaaatgggaaccctttgagaactttccaaagctgctggtcctgcagagtgccctgggttttccatccaacatgaaatggctgacatcatttcttccatgttaagagcttcaagcactgaaacaaacataagacacatgaaactaatatagcaaacattttttaggtggtcagcttttttgtgataagtatctccagagctctgtaaatgtatgacataacagcatttcacttatctttcaaggtacctaataatagatacttcttttgagatagggtttttctgtgtagctttggagcctgtcctagaacttgctctgtagaccaggctggcctcaaactcacaaagatcctcctgcctctgcctctgcctcccaaaggcatgtgccaccaatacctggctctaataatactttaaacacccaattaaaacactaatagagatatatttgagtggtatatccaagacatttttattatggaaaaaacaaagatgtacaaatgtaaaatacaatgaataacatgacactatttccagctgttaattttttttatattgatgtacttattgtgtatgtggggggggggggtcagaggacaagttgagggattcagttttgtccttccaccacagggatcttagggatggaactcaggttgtcaggcttggtggcaacctgaccccagccttgactactataaattcatggctgactatcccatcaattctttcctgatacggaaaaactaaaaaattatggtactggagactaaatccaggattttgtgtggattaggtaagcactcaactcctgaactatatgtcccaagcaagatctttaaaaataaaacttaaattagggctggagagatggctttgtggttaagagtacccaatgttctttgagaggacacatggtcaattcccagcacttacatggtggttcacagctgcctgtaattctaatttatggaagaaaaaaaaaactatagatacattggaaggataaataacatatcataatctatttggaaagtagccatattaacagtaaaggatctctaatgcacgaaaggctcttttttatgtttatgggtgttttgcctgcttgtaagactgtgcatgtgtgttcagtgcccacagatgccggaggagagcatcggatcccccagagactgaaggtggatacagttttaagctgccatgtaggtgctgggaattgaacccatctgctagaaggacaatctgtggctaatcaccgagcctacatctctctagttctacatgaaaacctttttaaagttataggatacaaatgtcatttcaaaccctgaaatgtgcaacttcaagagctaaagagtatgactctggagaagcagaacagagtattcctcatgcacggtcttcagaccatcccagcaacttgtcagacacagaaattctcagcctcattcctggaccactaaccacaccacatgctctcacaagtgtttccaccgtaaagtttgaagtgtgggctaattaagttaatggagataagactattgagattttcttatggttatgctgctggtttggctaagtgccactttttccaggaaagtgccagtttcatcaaagtttacaaataagtctcataagaatatccatgaattaggtaagcacacatgtgcacagacatacacgcaggcgaattatttcttgatccatttctgagggggtcactcagattcttcaaacaggtgtacatctcctctcaatatgaagtcctcaccatatgtctccgagtccttgttcttctttctgaaaccctacaggttaggtcttttgcatcttcaagttacagatcttctcctgtcatgtttatttttctagtgactactgagagagctgtaagattttgggttattacacttttttttgtttttgtttttcagttaccaaatttcttcctggcttttttttttttttcacatttctatttctttcttggggcattaaacgtttctcctgtttcaagcttatctgcagttgctggctgaactctttttttttttttttttcaaagccactttaaaatgtttgtcagacaatttttacgacagtgtggtcacagaactgatgtatattggccattattttttctaattcaagttgagactgtcttgcctctttcactgacatatgcctttcaggtgtgtcctcatgatctggggtgttgctgtgatttcatcttcttgttttgcagccagtcactctgaagtgtccccaggttcacaggggcatgtgtgttcagtgtccttatgatactgggtgggtgggaggggggtcatagagggaaaagagcatcatggctgctgcacgagggcagaagctcagtgttccactgtctcctgatggcagtagctgacatggcctgagggccagcctaccctgtctcattctgactctgctgcccagtttggaagtttggctcattgtttggctctgtgaaatctcctgtgggtgatgtagaggccaaaagtccctccacattgttggtggtacgtgaaggtcttggggtgtagccttccactggttatgacaggggagtaagactttccttttgtgcctagctaaaatgggaccaaaggacactgtattccagtagctaccattgttctggtcctttggttgtaggtttcttggtgctttttttgtttgtttgtttgttttgttttttgagacagggtttctctgtggctttggtggctgtcctggaactagctcttgtagacaaggctggtctcgaactcacagagatccatctgcctctcctcctgagtgctgggattaaaggcatgcaccaccaccacccagctcttggagctttttatgtccattgatggttcatgttgcatacatttccaacaatccaggtggtttatgggagaaataaagaaaacacagtgtcccagttagggtttctatcgcttgaagagacaccatgaccacagcaactcttataaaggaaaaaaattaattgaggtggcagcttacaatttcagagtttttgtccattatcatcatggtaggacacagtggtgtatactggcagacattgtgctggagagataactaagtgtcctatcttggcttgcagggaataggaagtggtctgattatcacactgagggaagcttgagcaaaagagatctcaaagcccaccccagtagtgacacacttcctccaagatcacacctactccaacaaggctacacctcctaatagtgccactccctttgggggtcattttctttcagatcaccacacacacacagggaatcatacccatgtgatcccttgagtcacaaagtcctcagccagcatgctgtcttctttcagtcttcccttctttgttatattgtatcacaggttctggctaaatgaatgaggcccagtgacaaggggacagggagttaaaacattttctatgtttcctagtgatttatttttcagtccatggaatccatgtgtcttgcttcacacaagatttgataatatttaggatttgcttcaaaaaatgtagatggaaaagaaaagtgggtgagagtggagatgaaacataaccgccaaagggctcattatgaataaagctggtgataaactcatgaccatttattacagttttctgtctacttttgtccatgcttgaaactgtccataggaaaagtaattttaagtaacttaaaagtactatccttgcctacttactctctatttatagaactgaaatgtcatttgctatgactagagcatccttatgctcttattcacgtctatgttgggaacctgttctatgcacccacttgttcaagttgcttaaatattatacagttagtaaatttttttcccagctagttctactagctaagaagtgtaccccccttgcaaattcacatattgaggtctcatgccaagtatgctggattattatcctacctggaagtacattaacaaagtacacaattagttaagcggcagggcagggacctcctgcgacatgattatgtcactataaaaggtggagattaaggtacacatgcagatggggcgatggcatgtgaagtgaaaggaaagatgggggtaatgaagccaaggccagggtgtggcccagaatcgactgtctctcgcagccttcaacagcaaccctgactacaccttcaccacagatccagcttccagacccatggggcagaacccttctgtggtgtaagccatccagtatgttatagatttgttaactctcttttataaactgccattttagtgtttacaaagatggtgagcctacttggactcactttacattgcaacacttacctggaaagtttgatttttttccccctaaagatagactcttaggtgtaggatatatgaacttgtggtaggaacacttcaaggcatttgagcgaccttatctgagttactttgtagttccttgtgatgtgcacgagggtgattgctttgttgtgagcatgccattaggtcattatccctctattacaattctttgtctacttcagaactggaggaagggtgactgcaattatttgatgaccccctgctttttggaaggcttattcacattcttctagcatttttcctactgaactattaccttcttattagctagtttatgagaacgacccagtgaatgggaacagtaatgctttgtcacttctgaaatcggtttttcattttctctttatagaatgtttcctaagttttggaagaaaggcagagaagaaacaatgtatcaagactgaaacttggcagagaacagcaaagaaaggacttggtctaaaagttactgtgtgtctgtaagaactgctacataacactgaatcctcagaccctcaaaggttaagataaagaacaggacaatttaggagaggcccttgtatacatactaaagatagcctgttaattagaaaagacagtaagaacacaaactctattatgctagtctctacaggaacagaaatgctttttggctgactttgattctttggcttccaaacagtgtcagcctgggtcaagagaatgaagtgaatataaaaaaaaaaactctaagattttctaagtagcaataaaaataaatgcgcttcctggtgctttgctacccggaaggggatgctcaacacatgaaagtttagtctgatgtagatgaaatattctggttggtgagggtcaaagtaggaagcacggctagtcacattgccagagtctgggatcggcagaaggatggcaaacctaacccgtcctagcttctggggaaaaccctaccattccagtttggggtttgaaatataaatctctgggaaagtttctatttacttaaataactgaacagagatttaaaaaagaaaaaaacctacaaaggtaggcttaaagtacagcaatatttaaatatttaaaactaactattctcgtgtgtgtgtgtgtgtgtgtgtgtgtgtgtgtgtgtgtgtgtgtgcgcgcgcgcgcgtgcgtgcgtgcgtgcgtgtgtgtgtgtgtgtgtgtgtaaatgagagagagagagagagagagagagtgagagagagagagagagatgtattgggggagtgctgcatgccatagcacactcgtggagaccagaggacatggaggcagttctctcctcccacctttacaaagattcaagggaatcaaactcagatcttcgggcatgtgtgacaagtgcctcaacccagggatcctttttgtcctccctatttaaacgtttaacattttgttaatagagacagatgttgtttggaaaagaaaatgaatatagtcataatattttacaagtgactctacttaccatcatactgcaaaaatccattttcatctatgtctatttcagactccggctgtaaaaacaaaacagagtggagggcagaaatgatgcaattactcaattaaaaagatacgcctttaattaatgctttggataatgtaagaacaagagcaaagacggtcactgacagatggtgccacctactgggcaggtaacactattgcaccaagtttatcctcagccaaagctttaggatataatttaattaacttggttattaaatctttttgtgttagataaatcacctaagaagcttgatacataccttgaagaaatcatcctgagatattatgctgcaattgggaagttgtttctgcaagttcttagccagagttgtcttcccaccatttgtcacactgagccaagaaaacaaaacaaaacagaagattcaagaagacattggggaacatggaacattcttcaacaatatattttttaaaggatatttaaaactattcactgcttgagataaaaattctcatttcacagatagtgttttgtcttgcaggcagaatcacaggtttgaaagataagctgtcctaatagtaagagacaagtgacggatggagagaggcaagtgacagtcggataagtgaactggacactaacacttcaaaacacagacaccatgcaggaagcaaaacaatgctttgactatctaaacagctccatgttcgaaacacaccccagagaatatccttggcacaccttgctgcaagtttatagaactgtccattgtcatagtgagtgtttcaaccacacagggaaaaaagaggagtggcttataagaagcccgtccacgcatgagcccacatttcctgtggcaggcctctgtcccctctctctgtagctggggcccatgtagaggtccagggttacttctttcaggtaggttatttgttccttctggttgcaccttgacatctggaggcataggtccccatctaacttgtgtgtcctgtttctttctatactgcatgagaggggcatttctctagccaacctttctttcctttttgggtttttcttttaaaacaggtgttgctctgcagtccatattgaccccctaactgggtagttcaggctgcaccggaatttactgggaactttttgctctgtcctcctgagtgttgggattacaggtattagccacatgcctggctttttctatttttttttttttttttttgcagagaggtgattagctcagtcacatccaaagggtccatgaaagaattcagggtcattgtgaatttgaaaggaaagaaattacaccatttacactaactaaattctaacaggtaattagcagctccttttattataagtagtaaattacagtagtaatgatgccttcgacttggacatctataagaactgcaccccttttcactctgagacgcaggagagcaggtatcttgaagaatcacaggttctcactattgtttcaagcttacagaagctgtttattagactagcaatgaactatcaagaggtcacagatttgtttacaaatatatatattttttcgagacagggtttctctgtgtagctttagagcctatcctggcactcgctctggagaccaggctgcccttgaactcacagagatacgcctgcctctgcctcccgagtgctgggattaaaggcgtgtgccaccaatgccccacttttttacaaatattttatacctgtactttaatacaattgactttctttgtattcctgtttttcattttgtgcatttaaattcactcagaaaagaggccaagatttcaccacaccccaaatgttcacagtacaaagctcctgactggacatctgttggcaagaacccatgattagttctgggtgagagcaaccagatcatgtttataatctaaagaaagaaacacgttcatcaaaagtacttgttgtgaggctgggcatgggtggtgtgtgcctttaattctaatgctcaggagccagggcaggtgggtctcttgtgagttcaagcccaccctagtctacaaagtgagttccaggccagcaggggttacatagtgagaccctgtctacatttaaaacaaaaaagcaaaaacaaccccaaaccaccaaaaaagacccaattccacaaaagaacatgagcaacaaaacccaaacaaaatgcttattggatataaatcatgtaatcattatcacgtaatgcaattgtaaatatgtaaataccttacattgtatcattatcatgtaatataatgtaaacatgtaaacactttatcaagtaaataccttatacctgcaaagtagaagatattaataataatgtccattttaccttacaatgcacaggtaggtagggtatggggctgttactctatatactgagaacactgatatgaccttttcttttttttaacaaaaaatgtctataaaccatactgcaagtccatattcaagataccaagcttttgtttaaaaggaggaatctactatgatctgagcaatctggtcagaaaatgtgtcatttcttacactttctctttaagatcggataattaaatcaccaacaaacagaccccttcccactgattcagctgcagccacagagaagacagcactttgcttaggagtcctgcagggaatggaccagctgggaacgagtttcatcatcgaacacggagcctgtaatccacatttggaatgtggccatcccaggtgacacctcaggacctattccttccccttcagcaagctcagaacctcctttacacaagctctccccaccccagggaagagatccagaccccaccccagggaagagctccagtggctgcttgatgccattccttttcttgtttacaaataaatggatagcttctcttgtaaataggagggtgcagaagtacaggcggaagctgaaaacagtgtttataatcaaacaagatgacaacacttccataacaaggtgctactaatactccatattccagctgaggaaagaagcagggcttaggaagctgcttaccgctggagtgggaagccaagtttaacgacagcatggctgtctcatcatgtgtagtcctccccctccccccaccccttacccccaccccagattgaactggtagatgtggtaagaaagttagaagattataattagggcatgatgacctactatgggagagtggcagggagtgtgaaacgaagcggaggacaagagtaccacagctttggttctgagcagacaggagccacaacaaagcgcagtctgatgtccagctcactcttaatttgctttgttgttgttttttcctgtatctgatgctggggttagaacctaggacctcacacatgcaggcaaatgctctgctaccaactacacccagtgccatccgactcctaggattgattccttcgtgatgtaatataataacacagcagatttcctccctcaaattacatttgtaatatctcaattgatattacagaatgacagacacaacccgggagcaggacaaataatatcttcccagtggccgttgatgtcacatttgcacatcagcctctggtgccacaggtcagatgaccacgcaatttagaatacttgggattcgtggttaatatcacaccggggcaacacaagctagcctagccaaatagtacacctggttgccctaaaggtgggggaagaggactggaggaaaggaaacctgttatactcccaggtcaaaagctgggcataaaaaaagaagggagtgttatatttaacaatcactctcaacctcatgtccagcgtcagctccagtaaacaaatggaaatgttggtaacactgatggccctacctcttccttggggggggaggggggggggacacccaggcccctcccactgatggtcatgcagcagcctgggactcagaagtccccacagctttctccaccatgttcacatgagacaccatctggacatctccagtgtcttgccagctgtttatggaggaactactcacccgccaattccaatgacaaatgttttcataattggccttggaaatcacgtcttcttaatattttctaaaatataaatacatataaaataaaatcagagttagtcttgaaaagcaataacaaccgagaggggatcaatggcctcaaccccatattccccactgtctggcttcctgttgccaatggttggggttttctcagggcctgttaactaatgtcacgattgtgtgacctatttccctgggttaccttatgataactattcttagttgtcaacttgactacatctagaatgaacaaaaacccaagcagctaggcacacctgtgagggatttttttctcttacttaagtcatttgaagtagaaagacccacttttaatccagatattctgagtgggaagatacagcttctgcaggcagcctatataagggtcatggaagaaagaagggtgcttgccgggcgttggtggcatatgcctttattcccagcactagggaggcagaggcaggtacatttctgtgagttcgatgccagcctgaactacagatcgagttccagggcaggctccaaaagctacacagagaaaccctgtcttgaaaaatcaaacaaagaagggttctctttttacctgcttgctcttgtgggcaagttcattacttcactgatattagagcctgtttctttggaactctggcatatactgaagacaagctgagacatccagcctcatggattgacagactactggattcttggaccttctgttggtagacagccattgtgactagatggactatagccaatttaataagtctcctacatgtttctttttcctataggttttgttcctctagagaactctaagatacctctctatgcccttcctgcttgactaataagagaaggcactgccaccagaggcagagacaaagagaagtcagtctgtctctcattccaccccctctctctctgaaaagctttcactggtacagtataaattctgaagctttgcagaagtacaaactgttccagactggaatgacataaatccatttctagaaaggccaggaaggaaactagatcaactaagcgaacaccttcctatcatcatcagaggctctgaaatgcttcattatcaagagcacaaaaggatgttagatgtgtgctggctcatcaggctctgatggctaacccatgtcatccatattgatgtgctatggaaaagccatgcatttgctgtgtacagttactggaaaatactggtccccttcctgctcaacatatatctgcacacacatcaggatactgcctcaattacataggatttaagtaatgactgtggctgtggtactagaaagacttaagggggttacctgtgtgggaactctagcaattcagagatgagggaatgaggtagaagaacctagttgtaaaattctttgggtaagaagggtggaaactcttgcagtcaaatacaaggaattgcaaggctgtgttttctctctcaaatcaaaacagcacccctaccccaaagcccaatgacctgagttactctctactagcttgggaataggggttctatccccagaactcacatggaaggagagaactgacccttctgagttgtcctctgacctctgcccacgtgcatgacactcatgtgcccacatatatactaaagaaataattgaaaagtttaaaatccaggcacccaggtctacattagttagcaacctgggactatccaaagcagtgtttgggtaaatgctggacctatctcaccagcaacagcaagtgatgatgcaggaggggaggagaaccgggccatgcagaaacaaggctggggccaggctgagtggctagtgcaacagtgagcgggctaaaaatccctgaagctgtccatttcaaaatctgttggatacacaaggcagtccactccacattcagacatggcaccagcaacttccatttaattgtaagttagggcctctttaaatatggtttgaggggctggagagatggctctgtggttaagagcactggctgctcttccagaggacacaggttcaattcccagcatccacgtggcagctcaaaactgttattttagttctggggactctatgtcctcacatagacatacataaaacaaaacaccaatgcacataaaataaaaaataaatgacccatttaaaaaacaaataaatatggcttaaaactcagattttgaacaaattataatcaaaagttgccaagctggtggtggcacacacctttaatcccagcacttgggaggcagaggcaggtgaagctcggtgagttggatgccagcctgctctacaaagggagttccagaacagccaggatgttacacagagaaaccttgtctcaaacctcccctctctcccacaaaaagagttgccatgctttgcatatatctatacctatatatatgctgaagggttttttgtttgcttgtttattttggaatcttttcatgtggctcagcctggacttaaagtgactatctagtggaagatggatgaccttctattgatcttgcctcttccagtcaaatggtgggattataggtatctgcctctaactctgcccttgcaacagagtatgtcatgaagcacacacaacttggagtaaagataaactgtaaatcttatgaggtctctggagatgtttcttttgaacatccagaggccttttgaaatttctagagtcacgaaatcagggtgtcctgtctcaccttgaatctcatgtagtatttatgcagtatcttttcctcagcagctgagaacatttttccaaggagcagggagaaaagactgagacaggagcaagcctttactgagtcccttgtttattcttttggttttttgagacaggatttctctgtggctttggaggctgtcctggaactagctcttgtagaccaagatggtctcgaactcacagagatccgcctgcctctgcctccggagtgctgagattaaaggcatgtaccatcactgccaagctctattttttttaaatttatttattattaatatcattttgtgacagaatctcactatgtaggccttctggtcatgaacttgcatagtaaaggctgcttctgtggcaaggctacctgggatcataggcatgcaagcctaagactggctcatttgcagaattttttaaaaaatacttttggcttactctcagtgaaatgttgaatcttcctcatagttggctttttttttatatttgatctattccacttctgaacatggtttactttgaattctaaagtacagagtgattcccaggggcacgcgaggaatcagcaggaactccaccacaaatctgacccatgtgctcttcagatgagctttagacatgttttcaggacttctgtctcctgtgttttattcaacagtgacctgatattctcccatgaacagaacaatctcgtgctactaatttaactttgcccttttgggaaacagaaattactcactttttaaagaaactagccttcagtagacactttgacactccattttatgaaggttctttttataaaaaaatttgctttattacatttgtatttatgttgtatgcatgtatgtggacaggtacatgacatggctcaccacagtacacatgcagaggtcataggtctacttgtaggtgtcagttctctttgcatcacatggttgctgaagactgaactctggtcatccggtttggcagcaagggcagttgaaccattttctgcagtttcttacataatcaggattttcatttttatttttctttcccctaatgcataacaatgtgagttgatgtgtgcataaatacaatatcatgagatgagctgttaggttaggcttgggcaacttttgtaaagtaccagacagtatatagttttggtgttgtgggtaactactcaactctgaagttgtaatgagaaagcggccacagtcaatgcataagaaccagcatggtgtattctaagaaaattttatggactcggaaatctaagtttcccctaacttttgcgtgccacatgccacaaaatactgtgctttttgcttttgcctcagctattaaaaacaccaaaaacattcttagaaggtagcaagtgggttggagtttgttaaccaaatgctgcaaaaaggagcgtcctgtcccgtgggaatccagacccgattcccctacctgcaaatatgtgatcacctagagctagcgcctttacagtaaagaccggtctcaggcgcgcgagtcccctcgcggtttccctagacgcaatcaggttccaggtccagcgcaggaggctctggaaggtgccaaggcctcggcgaggctacgtagctggcagtgagtactcaccgaagcgggttcgagtcctccccggcagggccgcggaacaggtcgcacgagggtcccaagggaaccactgcctcggactgtgcagctctctacctgcttttcggtccccaccaagcaaggcctgggggagtggccgtcatggggctcctcccccaccgaggagagccgggtcccagcgctcggagcaggctggacctccgaggctccgcctggctccccgccgcagccaatcaacggccggcgaggcgcggccacttcctggtaggaaggcagggcggtctgcggagctcgctggtccgagtgtcccgcatcggctgcgcgcgggtcccgagtggccgcagccagcgcaggcttggcgcccagttcccgtctgcgtgtggggctctcgcggctgagcctagccgctccgcctagcgccatgtccaagccacctcccaaaccggtcaaaccaggtaagagctctgcgtgccgctcgtgcgggtctccaggctgcgggtctctaggctgcggggcgccgagctggagttcccgaggagcgccctcgggctccccccccgccctgctcgccaggacgttccagcggagtggtggtggcagcacctaggtcgcggccacttcctcatagctcggcgtgtcgctgtcaagttggagttcttgaccggcgggcgaacgggaagtgcgctgcggctgggtggggtttgcgctcgctgcctgcggggcccggaggagagcgagccggggatccgggctctccgggtaggtttggagaactgcatccgcgctgccagcgggacagtttggatcccgaccctctagactcttcgctttaggcagtgtcgttctgtcgtacgtcccagtgccttgcttagggtgactctggaggacttcaactggagagagcacgaagttcctcaaagcagttttcttgaccactcttcctggttcactttttaaaagttgttcttagagtgttttctgtggtgtggagaaacgagatcgtttaaagggactgctatatttcagttcggcttaataaactcgtaggagcttcctctggataggtaattgccaggcaagaatagtagaaagtgggagattaatactgatgaattcccagcccctttcttccaatctgcaaacttggtattgcaaaggctgaaacttgagccatttacatcatcctttatggcagcttacgatgcttcagtattcttttacccccaggagtttttttttttttctaagtgtcagtcactccaaatttaataattattcagttttattcttttgtggttgcatcaagcccccgaatttgaaaaataatgcacacacatttgtgaaacagacattttctgacgacttcgatttttcgaggccgagggtgaaggaagtggctcagactggctttggcctgagcagagtcagggcggtgctggtttgctgctttcgatgtgaaatctgagaagtttgcaatttgcaatttagatgcggatgtatgaggtggcagttttgtaaactcagatgtaagtcaggacctcaagtgtacagctatgctgagttctttgatagctaaacaaagtgctcgattttgaagaatgtcccgagaatcaggtcgtgaggtttttcataccggcagacacattaaaagtgaagtccatattgcatctgtgagtgctggcaggaacctgccttcctgtatgtgattgtgaactcctgtggtctcgcacccttgggtgtggcttaggactcatcctattactaagtggagatatgcactgtgaactagttttgttgtctacatctctgctttttcctctagtaagccagaaaacacacagctaaacatttttactatttagagagaactcacagggatttacaagtgaggcccagacataaataagtaaagttgccatgaaaatcagtttgttggcttagtatatgccagaattccaaactgtgtgcttgcagacagaaacctttattatcatattggcccatatgtacagtgtggtaggtcatggtctagtcactcttacatgtttgaattcattcacttcttccggcaactgtatcaggtcagtaccatttttatacccattgtccagtggggagtcaaagagaagtcacataaagttaactcatctcttgtcagcagtggggtggtgatgaatggagcatggaggagtggagctcaggtagtctgactccaagctttgtgcttttcccccatgtgaggggccctgaatattttacagctggctaggaatctaaggttacagccagactgccttatacagaggagtgttgaacacccctcgttagtgacagcaggtgtcctgtacttcccttgtactccaggcaagtcacaggggggaaggtctccaaagaaacctggcatttatgagaacatacttaaggtttaatttttcatttattgctttgtttacccccctccctcatcccaaaatatttttaaaaattcatattgtcagagagttgggggagaggagaaagaaaaaggtttgggttagagagagaagagtaagaagaaatgagaagaaaagtaagctgataggcacagatgtcataaagctcctgtaaaattactgaacccagttgtcacttgtttctcagcttcaggcacccggatgagagaccaatggtaaggtccccagtgctcaggaaattaacatgtgttgcttgttctgggaagcagttactttaatggcactgagatctgagacaaaatttcccacagattctcttcatctgttggactggatatctgtacaagaaatagcagaggaataagacagcatgactcccaatttaatgggcaacattgcaaatacaggagctagatgagggagcagagggacagaggaggactcactgtaagagtctagttgtgtcttacttatttttcctgctgcagtttaagagactaagggtttcttttggctcacagtttgggagggatagtctaccacagctgggaagtcctggaggcaggagtgtgaggcagctggccacattgcatctgcagtcaagaagcagggggggatgtatgctcctgcacagatagcagcttagtttttatccagatagagtacccaaaccccgggaatggtgctgcccttgccaaggatgagtcttcacaactcagttaacctaatcagggtaaatcctcccaggcattcttaaacgatgacctaatctagataatccccataggtaaatctggaaacttgtctcctacatgattccttcgcctaatttaagtcagtataaacaaaccatcacaaatagcaagcaagggacattaaacaaccgggagtagggcggttaatgcatctttcaggccaaacagcctgaacccagcaagtggcagttagtggaaggaggctgcccaggcaagttctggtgagatccagccacatatgaactgccagaggactgagcagaatctcactactcccccaccccccattttttttttttttctggcccatgtcaagagtgtcctttagacatttcctttttctttgttcttttctgttttctgtctatatttgcttctttctctgtttctttttgagacggggtctcactatgtacccctggctggcctggacctcactgagctcagtctgcctctgctttactaccttgtctggtcttttgtttagacattctttactgttgttggccttgcaccaggctctgggggttcccagtagcaagaagataaagtcaacaggtagatggctgatcaggtccttttatttgtttaattgttttaagaagaaaaataaaaagcaaaaactgagcatgtagtggtgcatgtctggaacccgtactcaagaggaagagcctagctatgtagctcctactcaaaaacaaaccataagtaataaaatatatttctattttagaatatttgacacatacaggtgataaatatagtaaaatttcagaaacatcctttatcacctaaagataatacatggtttatatgaataaactttcaggttttatttatttttcccctgtaagtcagtttttattacaaaagggaaatagtgggctggagagatggctcagccgttaagattactgactgctcttccaaaggacccaggttcaattcccagcacccacatggcagctcacaactgtctgtaactccaattccagggaatatggcatcctcaaacaaacatacatgcaggcaaaaccccaatgcacataatacataaataaataaatatttttaaaaaaggaaaatagaagccattatctttagaatggtgtccgagtgtcagtttgagatgtcttgttgtggggctgggatatgtttctattctatattatctgtattatgcttgaaacaccatttcaatcacagtttatccatgccttgtgtagtattttgtctgctgtggtgttgcttttggcccctgaaggtttgtcattgaaaccttccccctactcattagacatggcctcctgactcagtcttcagtacctttggagtcctgaggcctctcagttagtgcagagagcttttatgtggtttccagccactccaggagccttgcaaggagagtggctatacctagcttgaagttgtacaggacagaatttagttctcccagagactgagaaattgactgatccatgggataaggaatgcactgacccttgagaccatctcattttggacagatttggtggcagtctacggtatttggagacccagtgtctgaccttggccatcttctccaaatggcttattgattttggtggtgagaggaaagaaagcagcataaatgtttcatgtgtcctgtgaaaataaatctgtggaacttaaaagaaactagccagtgttctgtcttctttgttactcatgataaaagcatgaaaggtgttgtatatatgccctttaaatacaacttgagaggaaaagagtctccatctaaatggtctcaactattgtgtaacccatccctgcgtaaataatggaatcaatggtgtgtgtgtgtgtgtgtgtgtgtgtgtgtgtgtgtgtgtgtgtgtgtgtgttgggttaaagagaaagccgtctgcctactttctggaaaatggttgtttcacacggaaagtgagattggaagtgttgagttctaatcctcgttgcagatgcatctgaggatgtggtttgggtattggttggctgtggctgatgagcttgtagctgtagttaaagatggctaggtgcttcaaaagaatgaaacaagttacctggtaacttaggtggccaccttcctgtccttgccagtcattccctactttatttttaatacccgaagtactttttgagcgctacaggcaagcttctcaacttattttggaggcagaaactgaagggcaattttgcagttgtacatattttgttctttttttttttgtggtgggtttttgtttttattgtttttttttcccccctgccctgagacagtctctatatagccctagccatcctggaactcactctgtagactaagaatgactcaaacacagagattcacctgtctctgcctccccagtgctgggattaaaggctctcagccttagttttctgttggggaagaaagctgtcacttcaaccacatctgcattgaggggctaaatacaagtttcctacaagctgcctaccagaatctggccctaaggtagctgctgtcagaagtaggagctgctgctgtggcaactgccaccatcctctttctgagaaaccctccccttccacaggggttctgcttcttgctgaataccttccttccccttctggagagccaaatctgtaactagatgttgaggcttaggggttctttgggaacccttggttcctaggacttgattctgcttgttgggggctctattttgtgtaaaaagctcttgcctgtttcctggggtgggggtctctgatgttgtctgctctggacttccttttgactggtatctagatccccaatgctcaaactgtccttaacccttgttatttgccactgttttactatctagatacctgcccagttgggtcctttgcatttcacagtgggcctggaggtctctctgcttttgggtaggctttggtgtgggcttgcttctctcttcaggccccatcttagacagaccctaatggcatggccagcttgtttgggcatgatggtggcaccttaaggcaccagggccacaggcctaggcagctttaccagagcatcttgcttagggttatcccagtcttcctcactcataatagttagaactcggtttccttttttctctgcccatgggtcctgaggatgaatccattgcttatctgatagtaagtggaccatgagtgttaacccaatcagtgatcttttgtagttccccagctctaaaatacttatagaaggtaagagtctgggatatagctcagctagtagagtgcttgccaagtgtgcgcagactcgagttccacctccagtgtcatataaaccaggcatagtggtgcaccctgtaatcccagcacggtaggcagaggaaggaggatcagaacctcaaggccagattcactgacatggcaagtttggggctagcctgtctcaaaacagacaaaagatgtatgtatacagtaagtaaaaaatctgcttctggaaaggaactcctgaatagtaagcggctctctgatggcaggattcaggaatggaaaccacccaagaatggacattagagccccaggctatacactgtagaggaagaggccgcttacagaaatgaaaaatacaacccagcttcgagattaagttctagtcctgagttttcaattaacttgctaggtgaccttggcaagtcacaagaccactctggacttcagtttcatcatcacatcttaaatctgattccagctttacttcattgcattggactggtcttttacataatttctcatatttctgaatgatttcgtgcgcacagcttctcataaacccttggattttttggttatttgctacctacccctagctgtgcctgctgcttagtgtcgtgtgaatccacacttctggggagatggaatgctccaggtcaggagttccatggctggtatgagagggaggagaggatggcacacagactagggtggggtacagtgtattgataattagatctgatcccattcacttattctgcctgtgtaggatacggttttgtttacagctaactggagaaagaacattgggagcctggcaggatgattctaatgagactgttgtaaaatgtaatgtgcatgtgtgactgccaagacaggttatttatttttctttgtgacttatttacttattaaactaatatttttatgatttgagaaatttttacaatttattttgatcatatttcatatactgttctcccagctcattccagacctaacctttacccaccctgcctcctcccagcttcctgtcccccttccttttttttttttttttaaaataacccaccgaatccaatttatgccacctctgcctctatactcacagctttggggccatactctggagtgtggtcaacctagcaggagccacacccttaaaggaaatgtcctccctccctgcagaagcctcaacccatgcaggattttgtgtttagcaaatgtcagctctgtgggcaggagctctaggaatatgacttgtaattttcagaaactcattctctgtgtaaagtgtcctttagagttcacctttgtgggcactcccaacttatctttctgcctctgttaaatgtgacgtcttaaacaatgggctcaaggtcagacttgctttacaggaattcccattccgattctaggcaagagggttttcattgctgatctttcatcaaagggatgagaagtctttccctaaaagggtccatgtgttaatctgcattgatgtgtgtctcactaagaaactgaaaacctattttcttccatccccactccctgactactaagtaaacaactcttagacttggggctaagagattaactcaggaatttataattatagtcacaggaacaagtttcattgcagtgactttaggattcaaaaattctattttagggagattatagtactttgaatattaatttgttgggatagaaggtgagatggcgggccacatttgaatgtagacagtgagtatagaggagagtggattctgagtttatctctgagcctgtggttcgggtgacgatggtacgtgagtggggctacagccctgctaacgctggttcttccatcttcgccccgagccactccattcacatattacacagcaaataatgccgcaaaactagggcttgagagggaggcagggtatccatagagtgtaagggcaaattccatagtcttctcccacacatgtctccatactcataaatatgtgaaatgatgctatgggtatccatcaattcaaatgtcttttaaagcaatctatgagcctagtatggcctcataggggagcaggaccttgcgtcttatagtgtcctggaggtgaggtactgaaatttgttctttttaggggttgccacctcccttgtcagcccctgagagaaaagggggtttctattgtgatttaccctattctgattgtggcctcagaaaacccacatctttagtgtagctggtcctgtactccagggaaattctagagacctctgctccctttggcctcttccttcttcctaatctgaggtggtttggggaagcactatgatacttcacctagtaaaggtcacctctggccctgtgggggccacttggacttactgggactttccagacctgcttatttctgttaaagccctttgtctctataaatggtctcaactgtgaggaccacagctcatcacctgtctgtctgtctgctgcttactggccagggatgaagagatgaagactgcagaccaggccctggaatggaatgtcagtggaaacattttattgccacatttccagggccaccatccattctcgctcctcctgtgacaggtgtggtacagacctctgaagtaatgcagcgcagtctagcagtctctagctgaaagccagtgtcggggtggggagggggggtgactgctctggacactcgatgatttcatgcagatagcttctctgagcccccccaccctagttgtgccccctacccaaaagcaaaacaaaacaacaactgagcactagataaaggtcctcacacacactacttttgagcagtgtctctagccatctttttattttgagacaagagtcctcactcatttgctcagactggcctagcctggccttgaatttgcaatcctcctgcctcagcctcctaagtgttgcaggactttgctatccggctgactccttgagaccgggtctttgtggcctttgtcgtgctgcagagaaaaaatggaatccttttgtttttggaagaggaagggctcagttttcaaagttattgtttgttgattccccttccccctttttatcatgaattttacattttgagcatgcctaggttttattttgttacaccagagtttcattattaactttctgccacagatttggccacccagcctaggtacattttggcccccagcaattcttcctgtctctcccacactgcaaacccttgtttcggtgccaggtttcaagagttcattggccctcaacacatttctagggttcgtatgtattgaatacgtttcttacagcactttgtcttgctagggtgtgcccatgggagctaagtttaagagggtttcattaacgctagtgttctagttatttaaatctgaagtgtttttgttgctgtttttttttctccccccacaaattgtctaaacactggttacacacattaatacatgaaatgatctgacctgttgtttcaaattacagacctctcagtagtaggacaaaatgtctataatttgttataactagtgtacagaaagggtgaaggcaggggtatggatacttcaggtagaggagagaaaataggaacaaaaacattggagtgaatcactgaacggaaagggtttttattttaaataaaattatctttagttttatgaaaatgtgtgtacatatatatgtgtgtgtgtgtgtgtgtgatatagtgtgaactatatttctttttgtgggtctgtttcaagcacttgaaagattgcacacataggcttagacatataagtgttttagtgattgctacactagagttggttatgcctgccttctctgattatgagggatttataagaagttcccagccattggaaataatgtggaaatccactaaaagataaagtgcaaacacccttccccctgcctctctgatcttgagaaagccctagcacatgttcatgccccatgcctgatctctcacccctttttccaccctttgcctcaggcacactcatctggcggttgtccctggaatgcacttcctgccctgcagcccctgtgtactcacactggtctttgttctggggcttcatttctctactctccctttgcatgggtaccttatgttatcattctaaattgaagtagatgttgcctcctgtaagctgtgctgttctcagtgctcactgatgtctgtgagtgtttttgccattgtagggatttgtctgcctgccatttcttttcatggctgtttcagagagaagaggggggtctattagtagctcctgataaattgtacatgacttccaagttgtccttcaacaggacattaataaagaacatgttttcttgtaattcctattcgctcttggcagttcatgacataaaggaaataaacatgacttgtagttctgctacccaaggaaatagcatttcatgtgtttttgtagcttttctttatgcatgccttgctgtacactgctaattgcatgtacaccacagccagtctcttatgtaatagcaacagaagttagttcccccaaagctgtgtttttcaaacattactgatcctgggacctcgcatagatgagacaagtactttcgatcatcctggcctggaatactcgctctgctgcctggtggctttgaatgtgtgaccatacatcctgcttgaaccttacaagtatctgggataatgggctgatgccacctggcctagctcagaaaccattttttttttttttttttgtaagaagatgataaaagtttaaaggtagtgagtgcattctagaattgtatacatgtacacattattgagtgttgtaaatctatgaattattctatattcatgtccctaaatctgtttaaaaagtacacacttaaactcatttgcttctccagtacatccaggaggtaatgtgtgttctgttcccttaattaaagcattgagatatttttgccaggatattgtattcgatgcattccctaatatacaagactagaattggataatactgttttgtgtgagtgacagcaaagacatgtgcattaatccctaagtgatgtacaaacacacacactgacaactaacaaggacacatctgtgtgagaagccgtatgcactactttatgtatgttaatattttcactcaggaacctgtgggttctctgaggactacccagtgctgagagcttgggttcttcaccttgacctcagtcatctagtctaagcctgaacccacagccctagggaagctttttccttgttttatggacccagactagggacgtcccatccataactgtagctcctcagctgtaaaatatgcaaggattcttgcatggtgcctggcccatggtaaatcaatgtcttgtaaatgtgagtttagaagggtcatgtagttttcagtgaatggttttagtgttcgggaatttcccctctttggtcttggatatgtagattcatttgcccagctaatggtctcctactggaggaagctgggcccagcctcatatggggtctttgtagagcccatgggctgcagctccccttgctctgccgaaatgtgcctttgtctaagttgttcctttcagaaagggccatgggatagcaggttttctgtacaggggcagataccgaatcgttcaggcttggtgggctccatggggtctgtagtgactgcatgcagtgagagagtgaaccacacagaatgcaaatgaacagctgtgttctgagaaatgataagtgaattcagatcattttcatgcactgggagtactgtttaaaactgtaaagctattactaggttatgggtcatataaaaccaggtattgctgtccaaagtcagttattaggcttctgcctttcacagaaaatggtccgtatagtttcagaactgaaaccatttttgtccactgttcctcccggtctcctcaaactattgaggagtgcttagcaaccatcatcccctttctctaatatttagttacccagggcatagtccacagagaccttgtcatttggaagtttgaatcctcttcttttaggatctttatatcgtatgtagaagaaataaaagtagccagcatgtatgatctttcaagaactagaagtaactaaggttgctgaagagtagaagcaaatgaaaaaaaaatggattagaaaggcacactgttaataaacagaaccctcttgtcaggagacacactggctactgtttgtaaagcgctcaccattcccaccctgaaatcttaagacaaattgcaaattcttctgtcttcccacccctttttggattggataaggggatagcagtcagtgaagaggtagtgttggaatgagaggaacacaaacagtgttcatagttttctctgttgatttgctttaatccaagagcatgagtatgtgggaagaaatgtattcagttacattattcttcacctccatagctcttggacattcctgtacctcaagtcccactggttttctatctctctttatttttgcagcagttgggcttttgtggaatgatacacatggaaatccaagccaagaaatgtattctgagatgatctcccatttgtgggactcccatttggagtccacaaagccccagggaggcctgtgttgccccacagagcacagctgtttcctttcacctcgggagctcaggagcggaaagatggctgtggctcttggatattgtcccttagactcctctgtttcgtttctgagcagaaaacatcctgtttcagggcctggagagatgagtcagcagttaaaagtgcttgctgctcttgcagaggacccgggttcacttctcagcacctgtcagtcttcaagactgtgactttaactctagccccagggatctgatgcctctctccctccagagggcccctgcactcacatgcacatacccacacacagatgtaaaggatgcatgaacaaaaagaaaacaaatctaaaactaaaagcaacagttctgtttagttatgcatgaatgataaaataccaatgagtggtagaaaacattaaagcttttacttacccccaaaatattaataaaggtatgaccctttcttttatgaccacaaagtatataagattaatattgctttcattttcttaggaaaataaaaaaagcatatgtatataccaaattcatattttctattattttacatcaaattattttcttccttttgagactctataattggttgtactatttgcttttgagggagagggagaatattgtgtttttagtgaatagctgaatcttaaaactaaaacaaaattgaagaaatgttttgtatttcttagagagtccttcagcagatagcctggagtatgacttttagggtttatcttttgaccttgacttctagtaagacatgttttgcttgatgatctagtccacaaaaatacatggaagcatattcatgcacatatatatccccccacactcaggagtttagtactataagaaattcatcttagccttatgcttccctcagaacctgcctctcagctttcaccaactggccagctggtgacccacatacaaagacagctgcttaagtatgcattatagatggaagaggaaagttcatacctaattttggtacccaaccagtcatcaaagaaggcatggtatttgtgtttactattatcttaatgtaatcattgataatgattgtgaaaccatgagtgttaagccccaaatcatttgaagagtgaaaatcatatgtacagattgagaattattgttgagatagcatggttgctaataatctttgtgggatcctcatcatcatgtagttaagtccaggtgatgagaaggtacacactgccctcagctttggctacgtaggaaccaaggcttactatcacactggcaaccttgtcatgggcaatagctgtcctagcagtgctggtgtgatagagaatgggcctagttttacaaaagtgccttggagctagacttagggtgtggagaaactatggttcctgaccttctacatgaaattctgaaaattggtgtatgcctgatagatggctagtacgtaaagtgcttgcactcaagaatgagaacccaggttaaagctactcaagtggtgtaagcatctgtaacctagcactcgacaagaggtggaaggttgagacagaattcccataagctctgaggccagccagcctggagtatatactagaaaaacagaagacccttcctggaaggcttggcctagttctctgaacatgactgctttcacaaatataagcacacactcacattgtacagacacacatacacatgtacatagacacgttatagatgagcaaaaaattaaaaagggtcttcgagatcatctaataagtttataatcatatactttaacttttgaatagtttcctattttttataatattatagtattttattctgtgtagacgaatgacatttacttttgccaaatattaattttaacagtttcttgtttgctaccagtatgccaaaatctgtatttgataaattctaaaatatctatttaggcattcatctatcctcagtgaagcaaacatttcacaagatcattatttaagctaagtatagtatgctctcatcttttctgatctagttaatagtttgttatttctttcagacaatctcactgcacacaatcttcctacctcagtatcctgaaggatgatagttctgtgtcaccctgtgtggcattacttagtttttaaagaaaagttttgtttcttggtctactaatggcttctgacctgtggttttaaaatgtggagacttcttgctctagcaatggtgagacaacaaggacaggccattttggcatgtaatattttcctgtgtaagagaaaggattttctaattttcttcttttcttatatggattagtcagggtttcagaactttggtctaaaatctcaatgttatgttaagacttgtggaaaatggattagtgctgttgctgaacagtttctttggttaattcctgccagctacttgagaatttaagtggttctatgtttttgttaacatggtaagaattactccatgggcatcacttactggtaaaactaaaacaaaattgaggaaatatttcgtgttcgttagagagtccttcagcagatagcctggagtgtggcttttaggtttatcttttgaccttgacttctagtaagacatgcttgatgatctagtcctcagaaattcagaaacatatgcttacacatatctgcacatacacatcccccacactcagaagtgtactagttgttttttgtttgttttattttgtttgttttacacataagagttttagtgaatgttcgctaagttgaacattcaaaatcctaagtgttttggaatcccaaacttgattttagagaagttttaaattcccagcaagattgagtgcaaggaacaaaggtttcctgcctgtcccttgtcagcccccatgcatagcctctgagctgttgttggcaaatttccccttttgtgtttttctaaattgttctcttaccaataaaaactcaagagttagatattggggtgaaaaacctgattgatcaaagaagcagaggaggagggaccagatgaacttcccccttccctttcttatcaaagatgcaggcagccagtgcccttctctccacacatcccagatcaaagagagcacatgagttccaagtccctcccttctccttcctgtcttccctagccacattcctggcttcactgtgactaattctggtcagctcattgctggctccacctcctgctacaaagttaactttattaacacagtctgggagtgtcacagtgcgatcaaatatctcacagcatcccccactgtattttctgttcctgtgacaaaatactatgacaagggcaactaaaagaggaagagcttagctggccttatggttccggggagtgagagtccatcatgggggcggagtgggaagcatggcagtaagcggtaagcttggccgctggagcaggcagctgagagcccacatccttaatcacatcatgtagcagggagcaaactgaaagtggcaagttgtttttaatcataatgcctacccctcagtgatgtatttcttctgacaagactacaccacccaaatttccctaaacagctctaccaaccagtaaccgggttgtagaatgcttgagactatgggggccattctcactcaccaccatattcaattccctggcccccataggcttatggtcatgccataatgcaaaatgcatttagcccaatttgaaaagtctccatagtttttcacactctcaacactgagtctctcccaagactcaagacagtctcttaattgtaaccaccccctgtaaaattagaaagcaaattatacactttcaaagtataatagcaaagaatactcattaccatttcagaagagaggaatggggcatagtgaagaactactactaaagcaagaccagaactcagcagggcagacatcaaatccttcagctccatgtccaatgtctgctactttaatctttgctgcctacaaagtatctctcttttttgggatgactcttttccctatatagttctgcttggcagatgcttcatggctctggcatctccagcatcttgggctttcctctgcaactcacttgatggctttccacaatggcttttcacagctacttgccctttcagggccttcatgcaaagattcccttgttatatactggctggcctcagcagctctctgaaaccatggaggaagaatccactacccctcattcttgcatcctccgtgcctctaaagccagtgtcaagtagacatggactacactgccaagtgtagctgccatgctagccagctgctagcatgggatggatactaccccaccatggatcacattggctgaggattgtttatttagttgctatgagaagatgtcttcagctctcttctgcaggttggaagcttagcgagtaggatgttgccctgaggacaccctccttttgctccagtgcagagtaggcctctgtaattcctaacaattacaacttagcctctaacacattaagcttcctgttgtttttttcttcctaaactgtacattttgccctacttgctctttttttcattgtagactacataaaagttatcaataatagccataccacaggttcaataatgtgctgttttgaaattctgccaaggaaattaatccatcagtttttcagccttggacaagttcttaggacaggggcagactgcaagccagattttttttttttttttttttttttttgccataatatcacaggaatggcctctagcacagtgctggtaaagtccttgcttccctccgaacacctttgagctggacttccatgatctactctgctgtcagtacagctggcttctcggttcctatgtggatgactctttaagctctgctttctagttcaaggttccaaattcctcctaaagacaatatggccagattcctttcagcaacagctcactctctggtaccaacttctagaccagcagagcttaagaacacgaagcaaaaaaaattttttttaagtgttgagtggtaccatttcctgttcctggacccttgaatcccggatgtaggagagaaagtaccatgtattggatgctcattcaaagcatatattgtcctctagagaaccctgcctcagccatcaggctattaccaccattgacactgtaactgtgtctttaaaagccattccacctccaccatttttatcaagccatttgtttttagcatagtggggaatgtggtagcaatgtgtattccatgagcatacaccctctgttgcggttctctgaccatgagagtccttggtcagagcaatactgtgtgaaataaaatgataaaatgccatgatggtggataagacattctgtaagaccactgttggtagttttgcagatgcatttcatgaagcaaaggcaaatctataaccagaataagaattcatcccagtaaggtcaaagcaatgccctttccacaaagacagtacaatcaacctgccatcatgtttctggctggtcattccagggaatggagccatgtcatatcagggctcattattggtctctgttgctggtagatccaccgctcagcaggagccgcatccaagtcagccttggtgagtggaagtccatgttatcaaatcaagcccctacataacctccatctttgctaccagagccactggtcataacccagcaatgaccagggcaggaatgactggggaaagaggttgactgtccacagaatgggttatcctgtgtatgattattaactcctgtgctgaagtcatcttttgatgagcatttacctggaactgaagtgtcttcacgtgctttgtccatttggaaagctccgtccacatatttcttctgcaaatatctttctcaccaatttttctatgatgctccttccaagtccctgaccatccagctaaaccattggccacaattcatgagtcagtaaacactcacacacctggccttttatccttacaagcaaagcataagaccatgtgtactgccccaaattctgcccaccgtgaatactttcctggttgtcccagaagagggtggtaacactgaagctggtcacttctgggtggtgcctgcataaactatcagtaaatcaagccccagtcttctctttctcagtcagctgatcatagagcaaactcaatgaagccatcagtgtgtgcttgggaacagaaggcgttctaacacgagtaaaaatcatagacatttgggcagcttcttcatgtaacttaattgtgccactggagcttggtcatgtacatattacttccatttgataatggattgctgtggtgcatccctacattatggattagtgtgtcagataatactcagattaggtcacatggtaacttggagctcccccctcccaccaggtttctactaaggtttaatagcaggttaagagttgctgtctttacaagagagaccagtcagcagacaatgatagagccttgcttcaaaatcctcagtctctgctgtgagttatgaataacagcttgcttaacaccccagacagtatctttgtctgctatgacaccttaggtactgtctggtctgctcaatcatataatctaaatagtagaacaaccagggcctgttgaagagctctctcttgttacaggtcccacttaaagctggcatcattctgatcacttggtacataggcaagagaaacacagctaactgaagaatgtgttgcctccaaaatccaaacaggcctgtaagcattgtgcttctttcttggtagtgggaggggctgagtacaatttacccttaaccttataatatctacacacattccacactacagaactagaaattttacagaggtagaatactcttggatggatttatttcctatactctgatgtatgtcggcattaccagtaagtccaaggtgtttgttgcctcttgctcacttggtccaatcagcataatgtcattaatacagtgactggtgtaatattttgtggaagagacaaatgatctagatcccttcaaattaagttaagacacagagctggagagttaatgtacccttgaggtagggcagtaaaagtgtattgttggccttgccagctgaaagcaaataacttcttgtggtccttatggtcaggtattttaagaaaaagtatttgctagataaataccggcatatcaagtactgggaaatgtgttaatctgcttaagtaaggagatcacatctgggatagtagctgcaattggaattactacttgattgtttttgataatcaactgtcatgctccatgatccatccacctatcttccacacaggccaaatagagttaaaaggagaatcaccaatcctatagctttcaagtccttggtggtggcatcagtttctctagtctattctagaatgtgactgtaatctgttccagaatgtgatactggatcatgattttcctgtattttttatccttttggggcctgccacccagctcccaaataaatacatggatacttattcttacttatgaatgcctggccttagcttggcttgttcctagctagcttttctaacttaacttatcccatttctcatgtgatgggggaggtccttctgtgtatatgtttgttttattggttgataaagtactgttggccaataggaaagcaagataggtgggactaggagtcaaggaggattctgggaaatgtagtagagatccaggcaggaagtgacatagcaggcagacttagaatataagcagcgacaagaaggaaatcgtcctcttgctcttcctcttcctcctgctctcagacaggattgacagattgatagctctttctcaatttcgtgggtggtggtgcatggccgttcttagttggtggatcgatttgtctggttaattccgataacaaacaagactctggcatgctaactagttacatgaccccccagcggtcggtgtccccttacactcattaactatgttttgcctctggactttttttttttttttttttttttttggtttttcgagacagggtttctctatgtagctttggagcctatcctggcactcgctctggagaccaggctggcctcaaactcacagagagccacttgcctctgcctcccgagtgctgggattaaaggcgtgtgccaccaacaccaaacacctctggactttttaatctttattatgtatgtctttcttcattcttacttcatggctgactgtggggctgggtggctggcccctggcatcctcttctccttttctcactcttccttctcttctgagcctagatttctcctcctatttattctctctgcctggcaatcctgcctatgtctctctcctgcctagctattggccattcagttctttattaggtgaatcaggtatttttaggcaggcaaagtaatgcaactttaagttaaacaaatgcaacataaaagaatacagcacatcattgtatcattaaacaaatattccacagtataaacaaatgtaaaatgtctttttttacatgtcttaaactaatattccacaacaattgtatgttagactatccagatcatatcctataagacagcctaatgaagctccttttatatgtattcattctgttggatctcttcacttaagagaaccccgactaatacattcactaacactgataacatcactatcacccatagacaaatttatagtggtatgtatacattattacagtacaacataatcattttactgtcctaaaggttatctttgctaccccctttctttcctttgatctttgtgctgtttctgtagttttcccctttctgaaaagtcacatagttagaattattaagatttgtatatggctttcttagattgatcttttttacttagtaaaacgcattgaaagtctgctccatcttttcatgatttgttagctcatttctttttattgttaatagcattccgttttctgagcgtgtcttctagaccagtcaattgtagcttgctgaattcataggtgggaatgattgatactaattttcttccctagtggcttgacaagcaccttccagcactatgaaagctggcatgtaggatgagccttccaggtcaacaccagtttgattttgcaatgtttatgacttaagcctgtggtatgtttagtaataaagtcttaccaccacgttctagatgataacctagaccattggcaatagcctgtaatatttgtggatctaaaggacctcactggctactatggttagttttatgtcaatttgacatcagctcctgcctccaagttcctgacctattgagttcctgccggaactgcttcctgtgaaggactgtgatgtggaagtgtaacagaaataaacccttgcctccaagttgcttgtggtcatagtattttattccattaatagaaaccctaagacactagccaacaactccaaaagaaataactcatgcgtaacatggctttttatttatttgtattgttttgatagggtaaattttatagggcaactccattttcactctttttgtgtatatgtatatggcagctaaatagttacgtgaagctctgccagtccttcactaacataatagatttgacagtttttgctctcttttacaaatcccaagtcatctaagtgttgttccagaagtgcaaagataaacactggagaaacccacacttccttcccctgcctgtgaaagaccagattccctccctcagcttttacctttctatgaccttgaccttcacgttttgaagtcttggtcagccttcctccagaggaagagggcagcacttggctgctgatggcggcctcctcctctctagctgcagcagggagttaatgagaaaagggaagagcaaggctggaaaatgagacctcagaaatggttgctgtggccagtggtggtggttagaattgcttaactcagagatcagcaggtcttcctgcagtgccagtcggatgctgctggatgctcccagactcagcgcacatttaagacagaagttatgttgggttctttttaggaccttcattctgatgaatcccaatttcaggccatttgcacagtctcccagtcccaggcctctctttgtaatatgtaagcatgcctgtgtgagaaaatgatgagcggcgagagcatgtgttgcatttacatcagcacagctctttgacatttgccttccttaagtaaacttggaattgttcagtgtgtgtccttgatctgccgccatgctcctgttgttgggagtctgtcaggatgccagcaagaagcactgcttagggttccatagacactgctgtgagcctgaagtcagtttgtggaacactgctcagagttaactcagtatgtcagaagaaccagtggattatgtattagtattaattgttataataaaatattcaggctggttgtgaacaatctactagttttgtgattccttagcctctggatgtttctgctacattgttttgtttctagttgactcagttttgagaatttgggtcctgatgctttagaacatggatcaaaaggctagtgccccactattaaggagtaaatagtgtcctgtgctaaagtgtcttctggatttcacagatagagtgctgcattatgtattaggctaattgctgttcagtatttagtttttcatcaaaactgaaagaactttggttatgcaaattagtggtttagtcagtcactgagtatttactttcgggtgctttcatttttatggagttttatctgagcccattaaagttgtcattgtatcttgtttccaagattatccacatctttcatccttactgttatctgtaaggaactagaaagttcattgttgatgttgatcacaatgggctgcttccttgctctttggaaagtttgaagtaattgagataactaatttccaccatcagagaacaatcagccctccagaaaactgtctctggcagttcctccccacggcttgtttttgcaccagctccctctatgcagttcaggctgtcctggaacttgctgtgtagattagtctggcctcaaactcagagatccaagtattgggattaaaggtgggcaccatcacacctggcttcctccttgtgatgttttctttctccctaatggttgtgaggtatgaatggagtctccaaacaaacaaacaaaaacaagagaaaaattacatttatttcttttagtgactttctctccatagaaacagagcgacagactgggtagtgacagcacacgcctttaatcccagcactcaggaggcagaggcagaggcaggggcaggggcaggggcaggggggcaggggcagggcaggggcaggggcaggggcaggggcaggggcaggggcaggggcaggcagatctctgtgagcttgaggccagccaggtctacagagagagagttccaggacagcctccaaagctacacagagaaattcttgtcttgaaaaacaaaaaaagaaaaaagaagaaaagaaaaagaaacagagacatagcacaagaattcagattgcaaaagagtggtctgtgtgtgtgtgtgtgtgtgtgtgtgtgtgtgtgtgtgtgtgtgtgtgtgtgttcccttgctgctgctgatttgcagatgttagagcactggcttcggcagttgcctttccccacattcttcattctgcagcagggcagggatttctcaggcctctgcaggtttctgttctgtgcactcggaagtctgttgatgaaacatcagaaatagatcttcatcctaccacattgtattaaacaaatagtttaaaaaaattctaccagtaagcatgcttgtagctgcaaatggtatctatactaaattatgttctttattataaaatatgttcaaatagcaaaagagtgtcagataaaaatgtatactcggaagcaagcttccttatctaccttggagatcagtttgaatgataggtttggatatcatctctaaaagatcttccagaacaggactgaagtgttaccagcctttaaatcagtggttcccaacctgtgggtcacaaagccacttagggtggaatgaccctttcgcaggggtcacctgagaccataggaaaacagatatacgcagtacacttgagcaaagtaacagttatggtagcaacagaagtaattttatgcttgggggtcaccacaacatgaagaactgtgttaaaggggtgcaacattaggaaggttgagacccagtgcttaaaatggatagcccttctattttgatctctttcttaacctatttattttataaaacacatacccttgtttgctgtagaccctatacagcttaaatttgtattaattttgtgaacttaaatttatactatatatacagtagatgctgggaaattgaagacgttgtgcccattccttcagatggacggggacagtgcaaatgatatagtgtgctggggaagtgtaaatggtacagagtgctggggaagtgctggggagtgtgtaggatgggggggtgatattgctcttacatggttcttttcttttcctccatttttctgttcttttggagaatatcaggtcccaatggattgatttaacaattttaaacacatttaaagtgttctttaaatttttttgttaagatgctcaacattatttattgatttttcaagacagagtttctctgagtagcactgggtaacctggaacttgtatatagatcagactgacctcaaactcaaagagatctgccagcctctgcctcctggagtgctgagcttgctagtgtgcaccaccacaattttataattcatttattaatgtgtgtgtgtgtgtgtgtgtgtgtgtgtgtgtgtgtctgtgtgttgtgtgtgtatgtgggttcctatacagaccagaagaggctgttagagcccctggaatggagttgtaggcagttgtgagctgcttgcatggcatctgtactgggtcttctggaagagagacaagtgatcgtaactgctgagtctcctcaactcctcaactttatattttgaagcttgacattactcttaggattgtctttacttagggcagagatgcagtgcaaatctataattcctgtcaaataaagctgtcccccaaagacatgtacttactgttgcattcatgtaataagcattttaaagatgcatcctgtggggaaaaggtactgtttctaaagcagtggttctcaacctttggttgtttgggtgtgtggtggtatcagataaccctttcacagggtcacctaaaacaatcaggaaacacagatatttacattatgatccataactgtagccaaatcacagttataaagtagcaacaaaaataattttgttattggggatcaccacaatatataacgaactgcgctaaagggtggtagcattaggagggttgaggaccactgctctaaaataacattcccaaatagactttttttctttttaaatacattatattgttttgtttttttttaatttttttatttgaattagaaacaagattgttttacatgtcaattccagttccctctcctcctcactgctcccccccccaactaacaccctacctaacccataccctttctgctccgcagggagggtgaggccttccatgggggggggtgtcttctgagtctgtcatatcctttgggatagggcctaggcccatcccatgtgtctagggagtatccctctatgtgggatgggctcccaaagtccattcctatgctagggataagtactgatccactacaaggggccccatagatttccgagggtttctcactgacacccacgttcatggggtctggatcagtcctatgctggttttccagctatcagtctggggaccaagagctcccccttgttcaggtcagctgtttctgtggatttcaccagcctggtctggacccttttgctcatccctcctccctctctgcaactggattccaattcagttcagtgattagctgtagatgtctgcttctacctccaccagctgctggatgaaggctataggatggcatataaatcagtcatcaatctcattaccaagggagggcatttaaggtagcctctcctctgttgcttagatcgttagttggtgtcatctttgtagatttccagacatttccttagtgcctgaattctctttaaacctataatgtctccctctattatggtatctcttatcttgttctcctctattcttgccccaactcaaccttcctgctcccttatgtcctcctcatccctcctcttttccccttctcattctcctagctccctctcccctctccccatactcccaattctcaaatagacttttaatttgggaattctaatggggggaatcgataacaattcagaatagttagaaataaaagaattgatcagattttttttcttcttttagggcaagttaaagtcttcagagcgctgtatacatttgaacccaggactgtaagtattctgatttaaactataaaattgacacagcaacctaagttgactttattttgacacctgttttggcccaagtcctctgtactttctgtccctccccactgttctccgcagtgagtgagctaagccccaggttgatttgcatggcctgagtttggaggtcatagacttctcacattgcttctctccttatgtgtggtgacatttgttttcaagtcaccaagtggcccacatacaaaaataactaaactacagagaccccaatcttagctttgctgtggatcaccaaccttttgtagcttcttcttgacccccccacacctcctgccaacctcccagagcaattattttatctcttctgtttacgtttttctcttgtggatcctgctgtccacccacccattcatggtttagtgagcccctgttctgtgccacacactggctgagtgttgtggatagtgcagcagcagctgaaggatgtataagaaagctagctaagcatgagggagccagcaagcaccatacctccatcattctcaaggctcctgcttgggtctggtcctgatttcccaggatgatggaaatgtaagccacaacagtcctctccttccctaagctgcatttggtcagggtgttttatcagcaacaggaaggaaagcgaacaccctccatagcacccatcatttctcccatagcttctccacagcattcatcatcatttgcgtgtctctcccactctgaggactgattcacatactggcccagggcctgctgggagatcacagtctgccattttctaaacctctaccagttcctcatttgaacttgggaatactgttcattgctctacactacagccaccctgcaatcctgacagaaggttccaatttgtggtccattggtggtcatcagctggtgacagtgattaatagccagtctaagtctgcatactcagatgagctttcccaagacttcagagacagcaggcttctggggcaaagagggctgttactcttgccacaggaggtgggtagagtgtttgtagagcgagctgctgcagcagaatcacagacctgaaattttagccacagacatagaattcctcataatcctggaagccagaagccccagagtgagttgacagcagggctgatttcttctgaggcctgtcacaatgacttgtagtaagtcactttctccccatgttctcacatggcttctccttggatgtgttggcattccagtctcttcgtggatgccagttgggttgggtttggggtctaccttgaagccctcattgtatcttaatcatctcaatattaagactccatctctagttgggatgtggtggcacatacatttaatcccagcagaggcagagcagaggcagaggccatcctggtctacagagtgagttccaagacaaccagggctacatagcaaaattctgtctcaacaacccctcaaagtaaagtaacagtacacacacacacacacacacacacacacacacacacacacacacacccgcacagtctctgagaacagtcacattttgaggtgctggggagttgggacagcagcccaggatttgggaggaagcacaaaagccatgacaggtagagtggcctgagcccagagtcatctttacttttgcttacagggacatctctgatgggatcaggatctgctgaggagagcttacagcatcatcaattgctcttccagaccctacaagcacgaggccacacatgcctcctctagtatgagacctatgttcccagagggtagagactgaagtgacttttgacacttctgctgcccttcccaggtgtccttagctgggtcactgtgtcctttatcactgacctcctctcgctgtgtggctcctcctgaccttttgcctttcctcacttctagcatgactcaaggttctatattctgtttgtgttccctgctaggttaatatttccaatgtgtggtttcaatccagcatctgctgcacatctgtttttcaccatgtggtcctctaaggcgtagccgtccctggcccctacccctcctcctccttgtatcacccagaggactctcagtagagcccatctctgcaccttctctggacccctggtgttgccccctctatgttcaatatgaactgtttgtcaccccatgaatactgcgctgagcactcccactagaagtgggtgcctcgcactgtgacctgctttggcacagtactgtacaggcaggtctcatctggggagcagaacccaggttcagagcctgtgctaggctttctgatttgtcctgcctcttgctgcttgtgacctggagattacttaacttttgtctctgttgtttcaattggttttagtgagaactatggtagtataaaggcagcagcagctggagtagtcactgttgcctgtgagtgagtactggctactctagtgatagacatttaacaaatatcttggtttgatatactgattactaatttacctccatttcttctctggaggaagtttctccatgatattttttaaagccttagttattattgaatattcaggagaaatatatatttaactcataggtaatttattctatttttaaactatgactatcatttttatatgctgaccctgaagatcagtaatggccattccacgtcctgtcatccccacactccttcatgtcctctcttccatcagtctaaatactaatctaatctagtgaacaggaggccaccagctcacacaggccttcttttacctgttattaaatattggacgtcctccgagacattcatttacttttgggagtgcatgaacctgtctcttggacaatgctggaagcatagtttgtccccctgtagcaggcagtcatcatctttgtatgggcacacaatacactgacaactcagcatgtcatgcgcaaggcacacacaacacacaccgtgccacaaggacaccacagcacagcacacagggtccttagcaccctgtggcacactgcacagtgcaggctcagcatactacacattgcgtataccacacacacagcacactgtttactcagcatgccctgggcagagcactctgagaacacagcacactgaagatattgcacaccttatgctcagcacacaagttcatagcacactacagaatacactgaatatacagcggagtatataacacgccacaaagccccacatcactcagtatactgaatgcatcattcagtatactgaggtcacagtactccaagtcttcccatactgtatgcttggcacaccaaatatacggtgcactgcaggcatagtagggtgagctcataacacattgtggtttatagcatgccaactacctctttaaagcattgtgactgggaaatacctttgaaggctgagctggaagctaggggccctttgcttgcatatacagcagtctagaaggctatggttttgcttttagcaacttaaaacccaggagacagtgagagtgacagccagctctagttttgataacgcattggctgggtagatagaacaaggcagtgtggctcatgattatctcttgcttcaaggaaaggtatttctggtatcacccagccttctgtaagtctaaccccccctctcagcccccatttggatgaagtgtcacacagacacctgcctggactggatggaccagtgtgaaagcatgttgcctgggaggaacaaacactgtgcctgaggagtgtcagtttctgaaggaaaaccagatggacctgctcagtcatacatgcttgcttggctgacctaggtcataatatgagaaggaggtctagagtagggatccaaaagcagagataagatccctcccatgctcctcgctgtgatcttcagcctttctgtatctgcttgctagatagagatacctatgatccagttctacctagaaaggtttttgcaaggatccagtgaggccaagaagactttgcatgggaaaaggactgtttttgatattgctgtcctacattactgaggagttaggatgaggaatgttttccaatgttcaccgtcactgaactaggccatgatatgatgatgacaggtaatgacgatgtgtgatgtttctgtgagaaaaaaaaaaaaaaaaaacccaaaaaacaaaagctggggttaggagttgggactccatagtctggatatcacatgctgagtgtcaatctcatctgtaatatggcaataaaaatggccctactctttagtattgttggggagaattaaattactgtttgtaaaggtcctgaccaattcattgcacatgagtaactgttataaagtaataggtgaaaaaaattcatgaaaatgtattttccttttggctaattttgtatgtttaggttaccaaatctaaaaaaaattcagaagtatatcacagtttttctaagcttttaaaaacacatatatttgcataaaccaataaaattactgcctcgggactgttacccagaatatatagaataggaatgagactgtacatttgcactcggtactgtagtcattgcttatttcttttggcttttgctttacttgaggcagtgtctctctctgcagcccaggctggccttgagtttagagcaatccccatgccttagcctcctgtgtgctggaaccaaaggcatgagtcaccatgtctagctgactttgttttaataccttgtcattcttcaaggagagctgagagaatgtggttaaaaaccagagatcaggctggatgtagtgacaggctcaggttgtcattggatccctgctttcctgtttttttcttccataaatacaatgccaggaatgcaaaagtagattctccctgaacagggtacattaagtggtctgttgtgggtttttaatggaaaatgcaattcttttaggcaatgtctgattttaacctataatgttacctttttgactatactgtctgtccccagaagtgtcaagaatttcataaaccatccctttagccatgctaggaaaggccaccttttattttgtcatttttgaagaccatgctgtgtaggtagcattgtacctgagagctactaaaggaaaataaactataaaaactaataaaattgctgggtagtggtggtgcatgcctttaatcccagcacttgggtggcagaggcaggcctggtctacagagtgagttccaggacagccagggctacacagtaaaaccccatctcaaaaacaaaacaaaaactatacaaacaacaacaaaaaccccaaacacataaaatggctagaccattttctccctgattggctattggttgttgcctcattgatcaacagacaagtggaagggtggggctgccgttgcctgtatagaacagcttctgttcatttaaagctgagtcagctctgtgaagtcgtcagatgactcagcttagtgacattttccgaatgattccctttgccaagccacagaataaaagaattgcctaaaagatgctgagttttgactttgtttttaaaattgaggcaaaactcacaacctaaaattaaccatttttaaagctaacaattgagtgggattaattcagttgccgtggtgagcaactgcttcctttaccaggttccaaaatgtttttactgccccagagtataaccctgtgcccaagaaggggccacttctcgtttcccaagtcattactcaattcatacagagaaataattagagatttgatatgtgtgctatgtgtacacatacgcctattgtgtattttgtattttaggctttttttttatttcacgggtgagtgatcttactaaagatggagatttaggcagaaatgacttctgaaggagactaaatcgagagggaaaggttagctccttagcttctgcaaggcactgattgaagagggctcactggggcctgtgagtggacaggtacagaatagaaatggcccaggacatctctaatgcgggacgggcacatccaacccttgtagaactccaggaagtgcagtcatcacagaagcagctgtggttcccacctaaccctccccgccacacacacacccattctaggtttccccttccttcccttccttcccacgccttggtactttctaaggagacatagtcaagtgatgataaaataccacggtaatgctctgagacggccactgtgttcagtgctgtgctgtagtgatgagtgtgggactcccttaagtgtctctcaggggatcctgtctgcagctagtgttaaaggaaattgtttctctaatcactttctatgtctggggcgaattgaaagtaatattggtcatccatcttcagaacaatggctagagaaaaatctcagaggtcttctgtttctcccctcctgaatattatttcaaatgaagttacagtgcacttcctcaggtccagtggatttaactagttttgtgtagcttctgctgtaaatctagtctctgtgaaccaaagtgtaaaggtaataaatgctttaggaagttgctgttaaaggaagtcagccattttgggggatgccatcagtcagcattcactaagttttatatatggtgaatttttcatctgacttcatattgtggttgtttcaagcatgatgtagttgccaacagtctttgtttatattcaggggaaaatggcagttataatagtgtagatgatatttgaaatgaaatctagggcagagtcttatatactcatcccagtttactcctcagaggaggcaaacacttggcagaataaatggacgaaataatttgtttcactagtgtaatttttattgtatgtgtggaataggcagaaatcaagtctttttttctaggtattttcctactagtattataaaagtatacttggtaatagcaatacatttggaaatttcctgtgaatattttagcatcatcatcattgcatcctgtgtctgtgcttttcgactctttgactattctgagagtctctttcagtgggtattgtacttcctgtttgctcagaaaatcatggtgttatctgtctactggaagtaacaagatacgtaaaccaagtgcttaactgcctttagagtttgcagaacacttgatgggtcaggccagagtgagggcactagctatgaagttagctcctggagtttctggatgacttcttgtattttagctcttttagggtatcaaggctgaattacatattgatactcatgtatgagaaacattctctctgagcatgaagaccagctaatacttttctgaagataaacaaatataagtattacttttttccatggtcttaattttagacatttatccacatacatacatacatacatacatacatacatgtatgtatatatcacacatgtatgttatataatgcatgtgtgtatgtagtatcatctaccataatttctaagaagaaaaagttttgccggtattttatgctggtgtgaaaatcctttgcttagtgatggaagaatataaaaggtgttggaaaatcttattatgcacagttctttgacaaccttcatcatgggacaaatccagctttagacttcaagtattaatttactacaagtcttgttgtatagtttaattgttgatgttaatatagaagtaatattgtctataaggataccttggggttttaagatttaaaaatgaaaaaaaaaacattgtattctaagataggaaaaaaatcacatggagttaatgtatgtatgctttttttccttctagccagatgaactgtactttgaagaaggagatattatctatatcactgacatggtaagcccagctaatgttctgtattactacatgcataccgtaaatacatcaccatggggctccaccattatatgtagccataatattgtaagttattttaagtgtacatttacatagaggtatatatgcagagtcttactttttgacacattcacagtaacatattgacagtagtcattttgttcctcaacaggaaatagttgaataagctttgttgaggccacagatggaactctgcagccatacaaaggaatgaggctatctctcatatactattctgatgtaattcaagtggaataaagcaagatttaaaaatgcatatattatgccttacttggctaagaaagggtgagagacataaacgtgcttctattttctgacattgaaaataaagaaaaagttgcaaaatatgacttataaaattagtctcctctatccaaaggaagggaatatagattttttaaaattataatttgttttaaaggtttgattttggaagcatacaaactttttatgtggctgtaaaattaaataattaaaagcagtccctaaaaattaagaacagagagtgaaccagatgagtctaatcatactctggcagttagctcagccactcagagtggaagtgtttcctctcactaagacttggagatttttagtgactaacaaatggaacagaatgccaataaaaatccaaaaaacaaaacaaaacaaaaaaaaaaccccaaaacaaagagtgcccatcttgacccacagtgctctgagggcagatgagtcattgtgtcactggtgtccattgtgggttctcagcatggggggaggaggaggaggaggaggatgtgcaggtgtcagtaaaatgaaggagaaacacagaaatccttcatttgaatcagaaagaaaacattacagtttatttttgaaggggaccttagaaaatggacaagccagtaatagtataatactctcattgaaaggaacaacacccctttgagaaatggctagtaccagctctggtccattaaatgtacaggataaactggctatcttgttactggaatagaaggcagcttcagaagactgcaagggccaccacactggagtgacaaggaaagcagtatgcactgccctgagatgggggccatttgagcatcaatcagggagggcaacaactcttaaggaccaaaacactgttttaagtttgtggttccctaatgttacctgaaaacaagtctcattggtactgtgaggaacggctctggaacgagggtgtttatttattctgatagctggtaagggagggagtcagtacttactctctcctttcttcctgagctttatcttgaacgatctgagagttggtacgggaaagtgactctttaaagagacatgctacttatttacatggaaaaacaccccattctgcaacccctatggttgacaacagctatattcctacagaagcaaccttgtcttgtatgtttcctgatgggggaaatcaataccacccatgcgatagttttccaaaaatgtgcggctgaatctgcttatgcttttagaactcaaaagcaactcatgggcaatgcatggaaaagggggggtgcgtttaatgatagcataggtttacaacaggcaaaatccagactgtttcagtgtctacagaagaaataagttgttccttcaaatatatgtgtatatatatatgtatacacatactatatatatatatatataatatatataatatatatcaagagctaaaatagtaacaataacaaaactaatgaagaaaagaatgaaggaggaacctgtaaattaaaagtgatgtaaaagtgaaattaattgtactatgtggttcttatttgaaatctcaaactgtgggccatttgacttagatatttgatggcgttaaggaattattggggaaaagtttgaaactgtggtaatcgtgtcatagttgcctttgaaaaattatttatctttcagatgcatattttgattttatagtatagtaaaaaaatatactacctatcactaaccctggtaacccaagaggggaaaatatgatgggtggtgggtagtattggtcacaagcaatgagtcaccagttagaaaatgttatcctgttgttctttctgcttctgtaaatatgttctttctgcttctctatgataaaaagttatccaaaagtgaagataaaacaagaagaaactttagaaaatgtggcaaaacataagactttatcaaaggagagacattagagtctggctatctaaatcctttagctgtagtctgaactgacgtgttcttccccctttctcacatcctctggtttgtctggttgaagatctatgctttatacctgctgtgaatgggagatgcttctgtacttaggtttgtgacaaggggcatggacacagatggcaagggtttgaggatgctggtcagtgcggacccaaaagaggacttggggacccaaatagtttcagatacaaatacatactgactcccctgttctcttggcagagtgataccagctggtggaaaggcacatgcaaaggccgaacaggactgattccgagcaactatggtaagtgactaggtacactgtgagccctgtttttaaaatggccatgcataccaggtgtgcacaggcccaattcattccaggggaacacttaggattctcctcttaatacttttcttaatacttttctttaatgctcttgaactccagatcacagattgttcctctagttcagcagttcttaacctataggttgaaacctttggggtcaaatggtctttttgtttgtgtgttttttgagacagagtttctctgtgtagctcttggagactgtcctggaactcactctgtagaccaggctggccttgagctctgcctctgctcccgagtgctgggattaaaggcgtgtgccaccaccgcccaactcaaatggcctatcaaatatcctgcacatcagatatttataatattattcacaacagtagtggaatacagtaattaagtagcaacaaaagtaattttatagttggggtcagcacaacatgaggaactatgcagcattaggatgagaaccactgttctggtttgtagtgaacaagtcccactttgctaagtgacagactggttatactcattaagtgctaatcagaacagcttgaggggcttattaagatgtagctcctatgtaaaacaattagtatttctaattgaaagatgggcaaactaggcaaaaacatgtaagtagaacctagcagagtaaagttaaaaaggcacaggattggtaaaccagggcccctgactttagtctttttcttccagttagtaacaaggtgcagtactgaagatacccctgagtgatgcctctggcttcgattccacatctgtgtaggggaagtgctgctgggttcagctcacatttaggagccttttaggcgttagtggtccatgactccttggactgatagagccagtatcaggcactggttcccagcactgccaatggattggcaaatatcagagacactgaggctatggccaggtcgagctcaggagcctttgcaccctgggcctcatgtggttctgttctttcgaagtcccctacatatctttccactgtgctatatttccagccttggccatagatactaatgtaaagtactgatggacataaagaatgtctaccccagcccttttaggatggcaggtatgagcctgaggtcaccctggagcagtggtcttcctctgggcactcctacccactttagggccacagtggttgaaagcagatagatggctgctatcctttgtgaacataggcagtgcagtgcagtgtcgatctccaaccctgctgcttgcctctagaagggagcagaattattatcaggtatccccaaacaaaggtgttcacagaatgctcataccttttatggctgttcctttattaaatacttgagtgaacttggtgtttggttcaggggtctgttctggttttgtttctattcctgttaatggctatgcttgctgctgtgtatgcttccagttcattgctgtgtcactcactgccttagtgcttggcctggtttcatttaacacagaatctgtactatcagttatttcctgttcctcctaatccacgctaagtaatttgttaagctgttgtatctggggctctggccatgaagctgggtgttcaatgagcatgatcaactcccataaatcacccagtaacttcaatggtggacttgcatttttgttttctgtctagtggctgagcaggcagaatccattgacaatccattgcatgaggctgcaaaaagaggtaggtttgattctccttttctcttttgatagacgatgtggtatattaaaatgtgtaggttttttttttaaatgtttattctttgacaatctcatgcatgtatgcaagtattttgatcattgtcctacctctaccttcagctctcccttccctataacatgccctctcccaactgcatgtcctctttttaaaataaacaaccgtgagtccaattattgtccatgtacacatgactgtgggccatctgctggagtgtgggcaacctaccagtggttacacccccaagagaaagaatgacttttctccctccatcagctgtcaacttggaatagctccttggctgagaaagacacctcatgagcccccttcccccctttcaaataggcattttgactggttggatcttgtgcatatagtgagtccatgggtgcctcgtccagaagacagtatttcacagtgctctttcttctccatcctctggctcttccattctttctgtttccggattctgacatatttcctgagccatggatggagaggaggcggtgcagatatcctgtttagggttgagcacccagcactcactttttctcagcactttgactggttgtgaaatctctgtggtaactgctgtcattgcagaagcaaagcttctctgaccaaggttgagagcagcactgacctatgagtgtaaacatgcgtatttagtaggcggttggacaacatgaccattaaagcaaagcaatagttgtaggttacctgccatggcctgtggcatccccagccatgggcatcgaaaagggttccagcaccaggcacaaattccctcctgcttagcaggtttcagatagaataaaagaaattgattatccccatagaagtcatgccactattgcaaatttaggcacatcttgcctgacaggttgatgttatagcaaaatgcctaggttttaattatacggtttgataagtttttgccaattacatatatacccagagcaccaacacccagattaagatctggaatgtttctgtcatctcataatgttctctcaacgtaccttcccactcaaaaccctgccttccctagaagcaacctctgtgctgactagaagggtaagagtgattttaattttacaatgccaggtaacacacttttttagcacttcctgcactgtgctcaaagtaggactaggcaggtggaaggaaggtcatgatctgattctcaaagctcagaggcagatagggccagatgggtgtaacagatcattaaaatgctctgtggggcaggagggcagtggtgtcctgggacaaagcatttagcagcgtgttgatatggtgggggattgtcttgatccccacaagcttggcacactggcaatatgaggggacattttgactgtcacaagacactgtgacaaggcattctgtcacaaagcattctttaggtagagccccaggctgttgctaaacatcctatagtgcctaaggcaaaccctacaacatagaatctctaaacctggaacactcatggctgttctattaggaagccctcctttgaataatggcaagcgctgatgcagcctcagcaagcaatttcattccatcccttatctgcgtgtgcaaagggaagggcttagactagctaaaacgacataaaaagcttctgtgtaaatgagatacttaggatattagcctgaagttttaaattggtagctgtaccttagcatagagtagtagcattgagcagcatacttagctcaaggtcctgcatttttttccctccccaaactgaaaatgtctttaaatatgaatagggagagttgctgtttgtagttaggttttgtgttacaccccgcctttcagaattaaacagagatgaaaacaatatgtctttttttctctccgaagcagaaatacttttagacctattttcccaacttctcctactaaaaaatggatgttactgctgtccgtcaataacccagagagcaaatgcaccatgataagtgcattaacaggcaggtcttgttttaggatttgctgattaatgcatcacaaatggagcttacagtgatgaaattgatttaaaagcaaaacaaggagtaaaagccattttcttgtgttttttataagtgtaaaattctttcaggcaacttgagctggttgagagagtgcttggacaaccgagtgggtgtaaacggcctggacaaagctggaagcacagccctgtactgggcctgccacgggggccacaaaggtactgcatcttgctagatacatgtgtctgtgctgttcagaatcaccttcacccaagggagcctcctttcttatcatggtaaaagcaatgctgcagatcctccaaagtccgccaaaagctgtgtttctggaaactgcagagcagtgaggatggaatgtgactgaggagacccactgtgcagacctctggaaaggctgggaatttcctttcctctctcaggcttcagaatgtatcagaaaaatgccagtaacaggataacaaacccactgccacatgccacagaggaaggcccagttggctcctgtagcttttccctagctatgcttttggtcctacattttaagtttaagtttaatgaaaaaaattaagaagtaccacactggcttaagtttgcagttctcttgcaaacagtaataattgcaaggtgaattctgtttacttcattgtagtccaaaccccaccatccactccttttcaccaactgagctataccttcaggtctgaaaattttcttttgtgatctatcatttagggtttttgtttagtttttaatataaaatttgagaaacttgtaagcattttctagaacattctcctaacaagtattatcttttgcaattatgctatctgcttttacaaagttcactgtttctgtcttaagaaactcctttttctgtttgaattgcagacatagtggaggttctgtttactcagccaaacgtggagctgaaccagcaggtgagcctgcttatcatggggaacacatttagcacacccagctctttctctaatgctacaagcacacagagttttgttgctgtgactgttgttttgtgttgtggtactggggtctgaagccaagtcctcacactgttcagctgtgtgtcaagagctacatcctccatccttaagtgctattctctggtcctagaacacatgctagagataatcagcttacagagagaaaaggtttctgtctgtaccagtttgggaagtgctgttccaccatcaggttaccccattgctcttgggctggtaccaaggtgagcgagcatgtggtggtgccaatcggctggctggctgcatctccagtgaacaatctcaccaccccattaagcacacaccccagggtatgaaggttttccactcacccctctccccaagactttaccacccccctctgaatagcagcatgccacgaatctctggggactcttaagatccaaactgcaccaaggacccttcttctaagggctcctctcttacccagactcccaaatgtgagccttaggagacaaactcccattacttctagttctggcagtttgcaagcttctgcttgtaacctgtctttttcttattggagtctttgtctttggtattctgaaaacttacaagggtgtgccttagtgctatttttccctagtgagtaccacaaagtcttttagtctgagaaattgtcttgtttccttttctacatctaatcattttctctgttcttttgattctacagattgaacctcatattttctttttttaaattagggatttcttggcctttatcattttaaaatgatttcctttttaaaggtttttaaaaattatctatgtatatacatacaatgttttgcttgcttttatattcaccacatgcatgtagtaccaatgaaggccagaagagggcatcagatttcccagggactagagttgaagacaattgtaagcttccatgtggttgctgggaattgaacttgagtcctctggaagagcagccattgagtgctcttaatcacagagccatctctgcagccccaactttattttaattgcctcaaagttctatattcattttctattgctatgtatcaaattatcccaggtttcacaatgtgtattgggtgggttggaattctgagcatgacatcacaagatttaggatctcacactgtaaagcccaggttccattggacctgggttcttggaaagcttgagattctcttctaagctcattgcagttgctgagatttgagctttttgccccctagtactgatgccctcagcttttggatgccccattcttctattaattaagagtttacaaaatgagtgtttgctgtcctcctcatggctagtaggtggtggtgtttgctctaccatttaacttttgtttttaaaagccttcctgactagatgtggcctacccagaataacctcccttttagtgaacccaatacatattgtctgcaaagtgatgggcttcttatttttgaatatgaggtcttactgtgtatcccaggctggccttaaacttgctgtgtagaccaggatagacttgaactcacagagatccacctatctctgtcttctgagtgctaggattaaaggaatgcactgcagtgtccagccaagaggagtgatgcctttgtattctctgacttcacccacacttgaggacaagagagttgtatatagggtctcttgggggacaagggagagcaggtattattggggttatctgagaagtttgttgaccacaagctcttattttactcttttaatggtgtctttttcttgtttgattatagtaccaccttatatgactgatatattattactttaaaaaatgttctcttctctcccagagccttttctttcatttaagctgacctctattcaaacacttaagctgttttcaaacacccagtgttttggttcatctatttatctgtgtgattggaagctatgtgcacttggtggcaggggagggtgcttcttgatggacatgatgaggtccctcctgtattgagtatgctgacataaatgccacacctccccctacggaggggccatactgtttggcagaggtgatctgcactctcctggcctaagtcaccacctttcactccactccctgggcaaagaggtgattaaaagtagcggagtgaaagatcttacagttcatcttataggttttcatctgactggctcttgtcaccttctctcataccattgtgcatgagctggggaactcgggtaatttctcagcaaggtaattctactgctgttagtgggacatctgccagtgactggtccaggggttccaatgatgttgtgttaatccatttggccactcctatttcctctccatgcctcattcttgcccagtacctctaggaatgttcagttcctgactgttgctgggtctcctcatttcctgttgaggccttgctctgccatgttagttttcttcccccatccctgccagagcagctcttctcattgcttgttcctctttcctttggaatgccacatggttctggagcttttctctcaatttgatttacatgggttaaacatactactgtcttcatccagtccactttgtatttttataatactattttccctttctttcaccatagaacaagctgggagacacagctctgcatgcagctgcctggaagggttatgcagacattgtgcagttgctactggcaaaaggtaaagtttttattgaatttatttggttgtttgccttgaaaaatagctcctagtgaaggaggccatttgaaatagtaggaaggctgagtctcctcctcctctactccgtctatagtacactgttataactgagatgaaattattgggggtgcatttatggtactttttactgtgaattaagaccttgataaactttagctccaaagctatacagagagcccctgtctcaaaaaaaccaaaaaaaaaaaaaaaagacctgataaactttaaaagtacatacaaatgtattaattttagaaggaacttgctgtgcatatctgtaggactgaaggattttaggaggccggggttttttaggacatcgtgtcctgggaaaattgggatgaagttggtgaggcttgtgcttgcttgggagagccttaatagagagtagaaatgaatgctaagctgagccagtgctgaggtgttaatgaaggatgctttgatcccattgcttgacctcgatagcttgtggctgactctgcatcctgaactctcaagcaaaccttattaaatcataaataatatatcaccacagtgtggttcagagcaaacagctaaatctgggactgctcatccatttatctgcttgtcccataaatattaactgctcttacagagggctggccaggcatgtcactcagggacttggcccagagggcaattctgtgaagcctttctccaagccacaagttatagattctatctttaggaatctttgggagcagtgttgtggaatttatgagcatggatgtttttggattaagtgagatgatgatgcaaaccccttactgtggggagttgctgggttttcctaaaggtcatgccgaaggctatgctgtccattgtggcagacacgagctgtgtgctgctgagccacttaatgttttcttttcattctagtgaacactttaagtgaacctgtgaacaagttgttgggggaatagtgctcattatactgttagaaatgatggaaatcagaaagaactgattcctgtcagtaaagctgggatgaaataagttttacaacatccacaaaatgcaatacctataaatgttcagatacgttgagttttgtgcgtaccttaacaagaacgaaccattatttaaatacggttaagttaaaagtgaagttataaggctggtgagatggctgagcagggaaaggtgcctgccacaagcctggggacttgaattcagttcctgggacccatatggtagaaggagaacatcaactctgggcttctatgtgtagcatgatacaggtgcccacagacatacatacaaagggaatggaatttaaaaaaattacattacacagcagcacaagtaggttgctttgtgtacatgttcatatgagtgcagatcattggcaaacataagagagacagctggggcccactggaagaatggtcaccttcgaagagcttagttcaggggaatcccatcagcactgttgagcacgcctctgtattttttgttcctcaacaatgcaaacaaacatctccatggattctgatgtaagttttggcataaagacaagggggaagatgaatggaagagggcttacagggacaatgaattggggaacaatgaattgcctatgagtttttattgttttgccattcttctgattgacatatgaatgcacctgcatataagaaatattagtcccctgacattcaacccaatagtgttttctacaggccctcatgaactgaaggagaggcaaagggtgctagatggaagccccaaagctttctgctaagagctgcataacctttcaggccatggttgtttatggctgtgttttaggatttacccaggacctgtaatggcctcattgaaaagtccacgtgcaatccctgggagctgggaagggaagggcagctttaatggcactgtggcaggctctctgatgaagtgtgccagtcacattaattcttagccagaattgttctctagctttgacaaagcattggctagcgcattccagtcttcgaagatacatggtttccttttcttgtgttgggaaggtgcgaggacagacttgagaaacaatgagaagaagctggccttggacatggccaccaatgcagcctgtgcatcactcctgaaaaagaaacaggcaacaggtatttgttttaagtcactctccttgcttatgaccgagacttgccatctttctattgcaaaggtttttgtttgtttgtttgttttgcttatttgtttttaagatttatttatggtctggaaggatgacacagaggttaagagcattggcagctcttccagaggtcctgagttcaattgttagcaaccacatggtagctcacagccatctgtaataggatctgatgctgtcttttggcgtgcagcaaacatgaagatacaataccatatatataaagtaaacaaatctttaaaaaaaatctaaaaaaacgatttatgtattttatatgtgtcttagttagattttctattgctgtgaagagacaccatgatcaaggcaacttttataagcccagataaataaataaataaattaattaataaataaattaataaataaatgcaggcaaagctttgatggaagggacaatgagagaggaagggaggggtgagtgttggttgtgtgtggtgcacttgtggcaacgagagaacaactttcaggagttggttctctccttctgctgtgggattcgggagttgaactcagatgtcaggcttgcactttctactctctgagccaactctcaggccccactattgtcttaggtttaatacccctcccaagaggcttacttttgcaattgctttgcctggctgctcaccattacaagccttggtggtactttagtgtctacagctcagctgatccatgtctgtagactcagagtttccattacagaggtgaaggacatttggttccatgtatatcatttgttatctcttccatagatctttttctgtctaatgaaaaactggttatatttctctttattacttttgtttgtttttgttttttgagacaagatttctctgtgtagctctggctgtcctggaactcactctgtagaccaggctggcttcaaactcacagagatccacctgcttctgcttctcaagtgctggggttaaaggcgtgtgccaccactgcttattcccattaatgcttgagtcctgtggaaactattccctcccctgggtgcccattataatgagaagtggccacatggcacattgttctggaccatacccagctcccaacagaagcacaacagaggcactccttagtcccctgccgtagcccatcagaaatcgtcagcatccttcctctcttcagggtttaagggaattccctcaaattatcctccttcccattaccaaaccccatcataagcctgcccatgaactgttgccctttgtgttgtctccccctttggttcacagacagtgaaaacaagcctggagtttggtgatttaaccatgagttaactggtgtttctttaaagacattcatttatggatgtgggctctggagggaatgacaaagtgtttgttagcttagctggtggtgcctggctacagattcgggtgaacacatattagcaactatgtgggacagaaaccggaaaccatgtttgttgctgggtgggcagcttttgttcaagttgacctcctggtccttggtgtctagttgggtcaggagggagggctgtggcctaacttcttttctctgccactgacttcctgttgctagaccagtgccttcagagagactccactgaggtgaaaggttttttagacgctgaaggttctcattctctgtcccttgagcttggtcctgatcagcaagttgaggctctatcttggtagggttcaatgcccatccttccataccctcttcagatctagagcaagtcttatttcccatgtaagctgcactgtgccagggagagagtgcaatctgggtgccatgctgccctgcagcaattaagctcttgcaacacgtttgtttctgagttgcattttccctctcaggaaatctcctagtgtaagaatttgacaagacagcagttacattagttgttttccatttgaccccattcaaggttgctttagcatttgacaggttccaatatatatatatatatatatatatatatatatatatatatatatatatataatttcagtctcttccttctttgtatacttaatttgtctgaaatgaaacataggcatctgtgttctcgctttgcttttcttcctcattagttgtctttctatcgtctgccttcaggtaaggcacaagctgtggactgactgaggccacatgtggcgtggctgctggtatgctccatgttggccacagcacatgaggctggttgctcacaaatgccagaatcagacagctggttcccctgccaggtgtctcactctgccaaacggcttggcagcctctctagtagagaaacttcttagggtctcatggaccccataattcctgggtcattggggagattgtattttgcattgcccaaagcaccgaaagtgaagaaaattctgaactgtctgtaatctctgcttgcctccttcctgtcttctctttagatggggtgcgaacgttaagcaacgccgaggactacattgacgaagaagactcagactgattcttccaggagctgctttgatgcctaaacttcttttgcttttgccattccaaaaccttggttgtattgccagaagagtattgataaccattctttttaaagtccatatgaacgtggcattgttgcactgtggtctgtgatgagtccggcgtggcatcagtgattctcacccgtgacttgccaataagtgatgggatactttgctgtataaatgctgtgttcaccagtgtagaacaagaaaaggttatttctatttatcaagctaaaggaattttaataacttttcttaaaaaaaatcaggttgtttttttttttttttgaattctttacctcaaggaatgggatgtttgagtggggttttcaagggggaaatgcttattataacagtagagcaaaactgtcaacagaatattgtcagctcttctgacaaaaataaacatttaaagagactttattatctgtttctgtgtggtcactcattgctgttaaataaataaagctttttgtactcaggtaagaacagattttatcttactttagatggtattttatattgatcagcacggaagaatcaagtacttgtgtttctctcacagcttcccatatctgctttatttaatcaattcatgtcttagaaaagaacaaattttaatagttttcaaatactcagaattgtcatcaaggtaacacttagagtggagaaactcagtaacctcagtgtggaaggttaaaaaaaatcttgatttccatcaagtggtggtggcacatgcctttaatcccagcacttgcagaggcaagcagatgtctctgagtttgaatctagcctcgtctacacagtgagttccagtatagccagagctatacaaggaaaccctgtcctgaaagaccaaaaaaagttttaattttgtgtcactgcagaaatgttcaagacggcacggtctcactatgtgcctagatttccagccccaggcccagaaatacattttcattttcaagaattcacacctcatttcaaaaggcttattggtcaagagaaggagatgtgtgaaggaggaagtgggctagctcaggaaatgaataaccattgtaggtgcatcttctggctctagctggttttctctctgtgggtcagtcaggtcccttgattgagaaaagcacctggaggaaccaggtctcggtcaacaaatttagtaggaaagaatccaaggaagattaattaaacagcaaagcatgtactctgagaataattaagaagggttatcactgtctccaattaaatgtgctattacatcttgtttctttctggttgtttgaggtggctgtcctgagactcactatgtagcccaaactgtcctcaaaccctggcattgcctcccaagtgctggaactgtaggcatgattcactatgcctgacttgttaataaatttaaactagccattggtatttctttataagcagaaatggaaagataccattccttcctgaaattttctctcttcccatagaatctggaaggacttctcactgaagcagggcatgcgcctcagcaaagggcttttagagatcctcaacatttcattcacctgtcctttgcaggtagggcagttgaacaatttttcagggcagggactgtataagtaaaggtaatttggggggaaaagggtcacatttaacctgctactattgcataggcaccccagctgcctcatccctctctgccacccttgagtcaggctttcccaggagcttgttcagtcccctatcccccattgtcctcatcatcgtgtgcccccttctcccgacaccccccctcccaacctttgctgcctgggctggcaggaactcttgcccatactgatgcttggggttccagctcttgagttgcttaattctagctgatatatccaaaatcttcaccactgagtccccttgcctttgtctagctcccgcgtgacaacaccagacgcaggtgtttcaaggctatgatgcatccatctaaccaagtcaattcctgcaattcccgattcctgctgtattctgcttccctgacatgaattgactggagtccttatatagttgatgctatttctcctctacttctggaagcctctttgggaatgattaagccatggtaatggtgagagctaacaggcagagggagggcactgggtgccaagctctggaaggcagacgagcacccccatttgaacctggcctagagcgacagcacctgccatcgcactacagcctttcctagcccagacaggacctctaatcctgccctaggagacagagagtgaaacaagaccctaaactctgcaacctcaaactgaatgcgggtaatttttatgaaattataatacatgcttttaaatagtatttgtgtttaaggtaaagaatcatagggttttattgccttttttcctttcctaatacattgtacctggaggatcccaaaagttggccaattagagcttttagggcaggaggatagggacacaggagaacttggatgtggcatcaagtttgatgcagctggacagtttatttaggtgtggttgaaatgctagcctagctgatttgagttctttaatgctgatctcaacaacaaaaattcagttccaggaagcccaccacactctgcaaggaggcctcggctgtgttctggaagtgatcggcagtctgctgtaacctgagcttcctggtagtcactgtagcctgtttggccattgcatccttaagcagcagccttccagcctcccgctggccagtgctgctggtccagttctagccctgaagcctcatgcaaaggatagttctcatgaggacttctgtttgggcttcctatctggggctggcttttgtagattcattgagtggccatgcattttaactggtgacctctctatttcttcagtgagtcttccctggctcctttttgcaaaagattagccatattgttattacccagggatgaaagatggacataatgttgaaaatgaaattttatattttaaattggagaaaatgataatgtatttgtgttgagactggctggccttcccacaggctgatattaaagctgtgcacagacaccatcaatataaagtgccaagggtctaactaacccagtggttcccaacctgtaggtcatgacctcattctgcagcattaggaaggttgagagtcactggcatagagttttggcttctgactttgctattgggagcactgtgcttttcatgccaggctgtagaaccaattacatcttactgtatttccctactgactggtttgtgggaaattttttttcaagactttttatactgcaagtatgtatgtaatgttaagacacagcagaactatgctaacttagcctaatttggaagtatctggttactaaaatgtgaagttttggtgaaatagtcagatttggtgacccctattttcacaaaaaaaatagtgtaggcaaacagttttcctaagtgctgtgaaaactccaggccacaaatttatgggttttgtctccttatttctaaataatatgcttttttttatctgcccctccctttcaatgacatgaaattaaataaaactgctgtttattaagggccttccactgattcctgtggtagacactttcacagacatttcatcattaatctttttctcctgctttattgcttttatttttaaacatgtattaagtattctacaaatgcccactgtatctccatcatttctacccctccccctccccctccaactccttcggtgttcttcccccgaccgtgctcccttttaacttcattgagctttccagtcactgcagaaaaccaaccttagttttgagatgctgtgctgtaaagttaagggactggctcaaggttactctgccttaggtgggcacacaggtctggcagacagctgaacccaagcacctggctgaagttggcattcacatttccagaagagtctgcagaaatctcagctcctttctcaccaaagccctggtgaaggcacatgaagaattcagcacacctgctcatcagccatgttccttaaaacaaccccaggtcacttcaaacaaccccatggattttcataaaagatggtttttccctcctagaaacatgttagcatgacttttgggttcccaactccccaatgaaagataattcagtaacaggtttccaaaatcaactgggtacacatgtattaacgtcccacagttctttgaactatcctagcccatttatttccgtgtaacgtggaaatagtgggtcccagaagggaaatgaatgtcttagcaggttcagttgctgcttgtgggcatgcaggaagcttcatgtttcccaagcccttctattgttttgtgtgtgtgtgtgtgtgtgtgtgtgtgtgtgtgtgtgtgtgtgtgtgtgtgtgtgtggtcctcagtctgcagaggtttcttggtgccctcatcctcaggcctctgcactgtctgtagactaggaactaggaggagacctgtgactaggaagaaaagcaatctaaaggaatgccctggggagcctgagagcccgaaggaaattggggagacacaaggggctgagcagcaaggagtggccaccttttgtaaactgcttttctggtagaaatcaaaagagtgcttcaagatgtgattaagagtttaggctttggagtcgcattctggatatatgtttcctctgctgctcaggctccaagacattggctgagtttcttaaacactgattcccaagccaaaaatagacaaaataatggtactgactgtctagagcagtgcttttcaactttcctaatgctgcaacccttaaattcagttattgtggtgacccccaatcatgaaatgattttttgttgctacttcataactgtaattttgctactgttatgaatcataatgcaaatttctgataggcaagccctgtgaaagggttgtgtgaccctaagggtggaaacccacagattgagaaaccctggcctagagtattacggcttaaatggaacaatacaaatgatattgaatgatgcttggcatgtggttacttaataagtaagtgttacttataagcaggaagataaagatgttttcattagaaacaagcatgtttaaaaggggcatcagtgttttctagtcattactgaatttcctcagatacttttagaatgatggaccctggtgtttccttccagtcatttagatgtgctcacacgtggcagtgttagtgaatataaagtaacttttgtgaactacaggggaaagttgcataacttgaaaaggcctgattaaaataagtcaaataccaggaatggttgtgtacatctgtaatctcagcacttgggaggaaggactaggaaggccacaaattcgaggtgatctttaatgacatagttcaagaccaacatgggctacatgagaccttatgtgtcaataaagtaataactcagagggcaactagggagaatatctaggccaatttgaggtttatattgccactgaggagcagtttgatggactttgaagagcctgggtccaaggctcagcatgtactgatttcaagtcagaaagttgtttggttttaccatcttgtatatcgtttcagaattaaagcaattcaaatgaatcaactttataactccatgttttccctctcatctcgatgaactgaatcccataatgtcagtgagataaagatgcaatttcagacacgtagaaattaagtttcatgcaatcactgatttggaacaagaatgtgaaaaggataactttatcattccccatcccagggactcctgtgataccaggaacaggtcttacatcatgtgtccttcggagtatggaaatggaaagtgtatggacacagatgggcttgaaggacccaccagtgccttccattcactgaaaccggatggaattttggagaagtcagccatcacagtctcacatgtcaccataataccagggctcagggtctgcagcccccaccccatcgtttcttagtctgaccaaggctctctggtctcctcagtaataactcaaggttcaggtgatgtcacctagtgtgaattcaaggtgctatgggtgggtccatttattatttttttttctaaagcttcccttcaagccctgctttttgcaggccccagatgacagcatcatactgtgggtgctacatcaaatcttctgcacgtcttcagctaccgctgtacctagtcttggaaccggagtccaagtggtaggtctagggtgagcaggtgattagaggtcaatagacccatgctgagtgagagtgagtggctcttacttgctggatctgtagatgtgtagatggtagggagtgttgctgttccgtgagctgtgtgctttccacctttgatttaaatcctggccaccacttaaagtatttctccacttgtcattcttggttagcaatagttgtggttttgttgttgttgttgcttgtttgtttggatttttttttctgtaatgtaaacttattggttactactattcctattacagtctcttactattaagaattttagaaaatttcaggctggagagatggctcagaggttaagagcactggctgctcttccagaggtcctgtgttcaattcccagcaaccacatggtggctcacaaccatccatagtgagatctggtaccctcctctggcctgtagggatacatgcagacagaacactgtataataaatatataataaataaatacataatacataataaataatacataatacataataaataaattttaaaaaattgccagtttcctgccaatacaagaattgttttacaattttgtccttgacaggccttagatgtcagtgtgtgctccccttccaattttgaatatctgagcctgagccccaaagtgattttctagaaggggcatgacagctggtacattagccaggtgcaagtgctgagaaagttgctgagtgagatgttgggtgagatgtttccctgctacaggcatttttttcctgtagggcgttttccaggtgttttccatccagtccccccttttcctcctctttaccttttgtttgggaacactgtagccacaagggcgtataaagggcctgatcaactcaacatcttttgtcttttatcccataataaatgctagcctgatttatatgggaagaaatttagataccaaccatagagatatttgagatgatggtgggtattctctgaatttcttagctggctattgctgtggtgacctctctcaggtgacaggagttgaatgtcttgtgttaggtactacaataacagggtcactcgatcccctgcagtgtgtctgctaacagtatcagccactcttctatttgccactggcttatttatgtctaaggtatttctttttctaagttgaagagtaagaactaactggataaattcagtattttgtagtatcattgccatttaggtcacaggagtatcctcagaatggaaccactgcttatcagaagtgttcttagtgaatactgtagctgttatgttttctttttaactgagagcccagtaaactttgtagtgttcttaaataaatatgaatggaaggccagtttcctttcctcagtcattcctaaggtcttctttatcttaatgactttcacatatttttattacagtgttaatgattttgaacctacatgtaaaatctcttattcaaattaatttatggatcttttctgttacataggattgtggtttaaattgcaactatatagatgtccaatactgtttaactttcatttattattttttatagttctttttatttttttatatatttgaattacaaacaagattgaattacatgacaatcccagttcccttctccctctcttcctcccctaactttcatttattattaagttttataataaatcttattctctttggaagtcatggttatttctatttgaatataagttacctgtgagtatttttctttatctgtgacagttgtacttgtatatcagttgatcatcttgatcctatctacccctatccctatcctctcatcccattaaggtccccaatattgccctcctacttttctgtcctctcttttttttttaaaatctaccaagtattgactgctggagtgttgcttgaccttgggaaggttttgtgcaggtaatcatagttgcagatggtgccgacatgccctgctgtgtacagaatacagcgcttcagagctttgtccctgtcctccagctctgacagtatctcttccccttgctggagatgttccttgaactgtgaagtgggaggttcatatagattcagccacagctggggtgtacccccacagttacttcctctcagcactttgagcagttagaggcatctgcattcaacactgcccactgcacaaagaaactgactaaagatgagagccacacaaatgtatgggtttaaacataaatgtttataaggcagtttgacaacacgttcattccctgacatgttgcctggcttcatctacttcttcgtggaacctttatacaaacttcaatgaccccataactcgtaattcttatatttattaaacctgcaaaatgagcaccatggactacttgtgtcccagaacaaactcttcttctcattagcagtaatcccttcaacaattacagccgcttagtctatacctgtcttgtcctcaacttctaagcgcccaaattcctttcctcaccaaactgtatgttctaataatctgtccatgctgtgatgaaacaccctgactaaagcaacttggggagggaaggatttacttagcttacacttccacatcactgttcatcatccaaggaagtcagggcaggaactcaaacaaggaagcaacctagaggaagcagctgatggaagagtgatgcttactggcttactcctcgtggcttgctcagcctgctttcttatagaaccaggaccaccagcccagggatggcaccacccatagtaagctggcccttccccatcaatccctaatcttgcctgcagccagatcttatggaggcattttctcagttgagattccctcctcccagatgactctagcttgtgtcaagttgacataaaactggccagcataccatcttctgttctgttacctgctcttactgtaacctgggcaagaagagtgagcagtaaccatgacatggataagctaagctaaatttctcctgccagataaattagtccattggtttgggattcagcctcattcaagttttctggacgtaatttgggatgtagttagatgtctgtctgtctgtctgtctgtctgtctgtctatctgtatatatgtaagtgtgtctgtctgtatgtatgtcagaacatggatggccccagttcagttgggcgtaatggcttatgaactcttgccctgtttgtgctagaatgttagtcaagctaggcttgatcttgtgcaggcaactactgctgtcctgagttggtgagtgcagtggtcttgttgtgtccagagaacactttcaccatggtcctttccaaccactgactcttacttgattttctgatgccaatttaagacacaagactgccttttgttctgtttccagtaaaagccagtggtggcattagatcacggaatgcggtggtcaccgtggtaaccacttcagaagtagggtttgagtttagacacaccattcttcttagggaaaagtagagtttaattcttatctccttgaatctctggtggcttttgtgacatgcttcactggtagactgcagtgaggagggactctgtgagctggatctctgttacaagaagactgccatcttctgctcaggttctcttgggagctagtaggcagggaatttgagtagacctgtggaaaggaagccagatttccagctgaaagtcagtgatctccctgctgacagctagcacctgtatgtcatgtatagaagtgagccatcttggatgtggagccttcaacccatgaggtatcaggttgtgagcactcaggcaattccttactggaatcctgacctgaaagaccacaagccaaataagaaactgctattttaagtcaccaacttttagggtcaattgttgtctgttgtgcagagtcacttaactacacctcatgtgctatttaattcttacaataactctatgatcgatgtcctgttatgtcattttgatagtaatgaacctgacccaaaggtataaatttgcccaaatgacggactagccagggtgatggggactgagccaagctctgcccactgtagctcacatcaagcgtttgagctaaactgctaatgaactttactgttttggtttcagcttacatgaaaacatggatgtgtcagctgaatgtattaggtcgttagtttttcagaagtcagattgcctctttttaatcttaggctcatggtgttttataaacagctgagaaattttggagacactctgaaggtaagctgtctcccttgtactaatggagcgtgcactgctctctatcaaccagtcaggtcactgaggaacacacagagaagttttaaaggagtaagaaatcaaacagaagccacaagttgcaaaactgttcccagaatgttaaaaacaagccataccaagccttggcctaacaagactgcctaagctcaaaagatctgcatttgcaagacaagcttttagtaccagctcctttttctcttattcaagaaaaactgtctggtgattgcaaaggacacctatcatttacagctgtgacttttgactgttccaagctccctccttatcacaaattatgtctctgcccataccttgcccatttccttttgccttaaatccacaccatgacaaaccttcaaatccaccacagttctcatgaacgtgttccccatgtcccagagagctaatacacttgactctttgatcacagctgcctgctagtgctatctggtgggtggaaattaatggcaggggaaagaaaggtatacctcagggcacacagagttaaatgagacattgcactgaaggcatgcctagctttccagggcataatttttcatagttctgaggctatgggccacaattgctttctccctaggcgtctgtcctaggctgataatggctgccttcccattatgttctcacgtgtctcttctctgagaatgcacacccctgacttggtgtgtccacattttcctttcatttgaggagagcaataaactcatcacaatggctctatttaaagtcatcatcttttcaaggttctgtttccaaacactgggagttagtgtttcaaagtgccactgggacacaaggaggacacagttctgcccttagcctggtctgtagacaattgaggctgtttcacgtgaatgtgctgacttgggtttacaagaatcaaatgattctattttattccttgatgttgtctctaattctggctactcagttgagttattcagccttttctggatggagagagtgagcagcacaggaggtgaatttttagaaaaggcgaatgaatgaagaaaggaggacatggcagctcctagggatggtgggggagatggttcattgtagatatgaggaagaatctagccagcggcatctggaaagctccaggctgaactgggccatgagaggagagcattgtgggagggagtgacaggaaaagagaattgagagggagcacagagatcacctgggagccaagagagcacatagctaaaatggttgagttatgtaggggtcagagaacctggggcaagggaaggggagctcagagactggagacctttaggggaggatgtggggtgtgtcagccgggatgactctgtaacaggtgcttgtgattctgagagcctggtggcagagtctgctttcctaggttaaataggccatcagttagccattagtcctgagattgagacctaacagtaaatttcctgggagagaatccatgggaatagtagcagatcttctcactgtgacaggtatggatagagattcttcagtaaagcacggccacagtcaattcttgtcacctcccagcgtatctgtaagtgattttcctctacacatgaagccaattaaatggctctggagaccaagctaattcatataaaaaattaaattcttcagatatttaaaatttagcagtttgttgcctagatattctcacatccttcagtttggggttatttctctagatcctccagaattgttctgacatgaatcccacgagctttgggagtccactcttttccccagtatgcctggagcgctcaagaaattcacatttcttcagatcacaacctgctttaatctctgctcctttggaatccctggaccaggaggctcctgaccttcccctcacatcttgaccccatatttggcctcgttgactcaaaatgctgccaacagcagttgcttatggcagacttcaccaaaggtgtgtttccttcatggcttttggcagtttcaggagcacttcctgcccacactctccttatgagtcatctcctgctgcttagcctgaggtatctcttctgggaaattttcccatcctctaattgctagaaacaccctgcgtgtttctaaatgctcacactgtgtgttcagatccttaccaaggcttctcttgaccacaagtacctcttcagctaccatctcaagttcctgttgtcaagtctgtcaccagttcttccctggagtctctctctggaagctgtctacttcttaccaccaccctgtccatgtcacatcacaactcagcagccctttgatgggtaacactgtgtccccgaatacactctactggattagccctgggccctttggaccctcaccatcaacaccaacagattctcatttctttttcagtgtaacaagaaaattcctttaatgggctttattccactggtctccacactgcctttcctctgccctagttaccaatgaaattattttgctggttgtattcacgcttcctattgccaacggtaatatccaccagccattcatcatgcttagaaccttcttgtctttgctagatgtatgcctattagtcctcatatccactgatccctggtgtgcaggctctcagtgctcaactctagcattacatctttatctgtctccacttgtggagatcaccatggttaaagccattattagatccatctgaattcaaggcccagtcccaccacttactgtttctactgactttgggtaagtttttaacatgctctgtgcttcaaagttctcagtgctaaaatgggaaaaatgataaagataacattgacaactttctaagatgattaatatttaatgtagtatagttttatgtaattctttgattaatgccatcttcttccaggtttctaattttctcattaatgagaccatatcttggtgtctgtctgcttatctatctgtctgctgtccgtgcatcggactatgtatacctggcatagtatttgccacataagggaaccttgataaaaatttttctaagaaaagagagttaactaaagccacaaattagtaaattgttttaaatgatctaatctcagaaattcttttatagaaacataaaacatactaacgcacttggattaacttttcccatactttcctataaatttctggtgctgttgcaattttatatgattcattttaatatgaggcaccatctcactcacacttgtgcatgcacacacacatacaaacacacacatccctgtattaggtaggaaaggtgctctagatgaatagatacaataaggtgtgtgtatatgttaaaaggggatttactaggcttacatactatggactgggtagtctaacaatggacatcaacatgctggagagactgagaacctagtagcttctcagcccatgagtctggatgccccagcagttctaatctaagaactgaagacctgaagactatcttgtagagtagcagaccttagtccacagtgaaggctgcagaagctgctgtagtctgatgtcattaaagggcagaaacagaagcagcagcaaccacaactgcaacaaaacaatgttgctttgacatcagatcatctatttgggccacctgtggcacggtgccctctactcagagggaggatctttttcctcagttcatcctatctggaaacagaccctcaagagatgtgtctttagttggttccaggtcccgtcaagtctgatagtaagattaaccatcatataccctttcatgaaaagagtaattctttcttagactctttgtcttttaacaggtcagttcattctctttcaatttttattactgataggcccgcacttacttctaccatttcattttatgcattttatgtactgcatgctttttgtattttattgcattcatctaattatctttattacttttcacttttaatagtttgccagttaaaaattttagtttcactgtctttatgttcattcttaattttgtatatgctcggatggtttaatgaaccgtaatgtttatattcttaatttccctttcaataatctttagattctttaactccaattgacattttctctaacattattaccatcttactttagttcctttgtgtctgtatcctggtatcactcatctttactaagaaatgttggagggggctggagagatggctcagaggttaagaacgctgactgctcgtctatttgtcctgagttcaattagcaaccgcatggtggctcgaagccatctaaccatctataatgaggtctgatatcctcttctggtgtgcaagcatgtatgcagatagaacactgtatacataataaataaatctaaaaaaaaaaaaaaaacaagacatgttggaggtactgaggctatggcctgaggttttctcctagattgctggacaacagacaagctgaagcctcttaccttactggagctggtgggaaaagggaggactacatttgaaaccatcatcctaatatggagccagagctcattaaggacctggtgttggcagtggtacagcacctaaagaactgtttctcatgtttatactgtctgtggatgagcccaaaatgcttctgctacttaagcatcctaaaaagagaaagcatgtaatttggagtaccttcttcctcctggagcccagatgcttagtgtaggtaattgcttcctagcccaaccacatctttccaccaatggaaagagagtggactctgttctctacttactcagcactcacccagtatccgtttcaatttagcacactatcagtgagcttctcaatgtcattttgtctgttaggagtgttgtggggtatttgtactctgcgaaatgtaatgttatgatttgtgtaataaaaagctgaactgccaatagctaggaagaggttgagtgggacttctggagacagagagaactctgggaagaaaaaggacagagttgccagccagatggagaggtagcaggaggtgcaagatgaaagagaggtaattccatgtgacagaacatggattaatataaatgggtttatttaagttatagttgagaacaaggctaagctgaaggccaagctttcataattaattggaagtctccatgtcattatttaggagctggtaggacaaagaaagactctttatgtggggcttgaatctatgacctaagattgagagtcacatgctctacccaactggttgtgggtttgagctctcatagggtgccatatgttaaaagtccctttttccagggttctctctgtcccgggaagtcccatctaacctcttcctagctttccactgtttggcttttcattacataatcacagcaatacattttcacacagtgtacaaatatcccacaacataggagtgcatcatttagggattatttctaaaagttatgtgtgacatatgcaaatactttcttttcctgtggaagagatgatttttctctgtataggattttaagttgtaaatcagttcccttagaactctaagtactcatttgttttctgcatggtagaccgtaaatgtctgattattctttatttctctgcataaacttcttttcctctccttgtgaaaactttgacatcctccttttggggttccatcattttataataataatatttccaaagttatgcatttgatgtcaaagacaccttttacattgagattactatgtaatgattaaagttaatgagcataaagttgtcactgtgatgtagtaagaatagttcaatcctatttctctccagttgtttactcagggatacctctgtacctctttgttttcctgtagacctgtggggctatggtccataatcttaaaataataagtatccaactacagcagttctagttagtgggagagtattggagtttccttttatgagatacactgttcagtttgattgagctaccaggatctgtaggagaacatgtatctgtccctctgtctgacttttgtctaagtcctactctccttttttgttgctgtttaataaaaacagcagtcatattgtattagggttcactgatgtaatctcatttcacttgaattacttcttttgagaccctgtctccaaagaccattttgtattctgaggtccagagggtttcagtttcaacacatgcattttaatgtggggaagagaacacagttcagtctataacaataagaatttatctactgcaggattgaaattattcaaaagaggtacttgttattttattgattatacatactataatataaattacacaaattaataaatttctctggcatatacacactcattcattttggcaatttttactctattgcccatcttcccctctctccaccctgtcttctgttcttcttccttattggtttttcttttttttggggggggaggggggagcattttcaagacagggtttctctgtggctttggaggctgtcctggaacttgctcttgtagaccaggctggtctcaaactcacagagatctgcctgcctctgcctcccaagtgctgggattaaaggtgtgcgccaccactgccctgcctggtttttcttttactcaggtaatctttacatttctacacatgagaggaaattacagtgcagaagacaggaagactaacaactttaatttagttttttcatacaatctatttcagtcatgtttttccctccctcagttcctcccagattatcctcatctcctttcccatccaactttgttctttgttttttttttaagaacaaaaaacataaaaatgaaaatcaaaataagaaaacaagcaaaacatagtaagacacaaaatgccaaaacggaataaaataaaatagaaattcccctgccacacacgaaaaaaacccaaaccatggagcttgttttgtgttggtcagctactcctgggcactgggcctgccgtagggtgtggttgatatacccagtgacactccgttgtagaaaattggtttttccctttgagttggtagctagtggttatcaattacaaattcttctttgactaagtgctgggacccagtcaggcttgaacctgtacctccttttcttcatagatccctgagccttcaggggaaggtttgaggaaaacatcccgtttaggactgcatgctacacagtttatcactctctacaaattgtccagttgtgggtctttgtgttaattcctatctactacatgaagaagcttctagaaggttgactgaggcactaatctatgggtatagcagtatgtcattagcaaccattttattgctatgttcctttagtagagtaatagtattaggttttcctaatactaaagcccatgaaatatttagcctcaggttcttggtcacattagcagtgtcctgtatgggttccatctcacagaatgggccttaagtccaattttaaaaagtgatgggttacaaaagaagcacattcatgcaacaaggacatctgttcaactatgttcatagcagcattatttgtaatagccagaaactggaagtaacctagatgcccctcgactgaagaatggatacagaaaatgtacatttacacaatggagtactactcacagagaaaagaaacaatggaatcttgaaattcacaggcaaatggatggaactagaagaaaccattttgagtgaggtaaaccagtcacaaaaagataaacatggtatgcactcactcagatatgggttatatacatagagcaaaggattaccagcctatagtccacactaccagagaagctaggcaacaaggaggactctaaaagagacatgcatggtcccctgaagaagggaaaaggacaagatctcctgagcaaattgggagcatggggggaggagagagggaactagaatgagaaggggagaagaggagggatgagggggacataagggagcaggaagtttgtttaggggaagaatagaggagagcaaaataagagataccatcaaagagggagccagtataggtttaaagtgaaatcaggcactagggaaatgtccagagatctacaaggatgacaccagctaactaagcaacagtggagaggctaccttaaatgccctcccctgataatgagactgacgactaacttatacaccatcccagagccttcatccagcagctgatggaagtagaagcagatacccacagctgaaaactgaactgaattggaatccagttgcagaggagtgatgagcaaaggggtcaggaccatgctagtgaaacccacagaaacagctgacttgaacaagaaggagctcttggccctcagactgaccactgggaaaccaacatggaactgatccagaccccataaatgtgggtgacagtgaggagacctcagaaatatatgggcctcttgtagtagatcagtacttatctgagtttgggatggagtaggaatggagtttgggatcccatttcacacagcgggatactccctcagcctagacacacgggggggagagcctagaccctatcccaaaggatatgacagactctgaagacccacccccatggaaggcctcactctccctggggagcagaaatggtacgggataggtagggtgttagtagggggcaggggaggaggagagggagagggaacagggagggattgacatgtgaaacaatcttgtttctaatttaaataaaaaaaaaagcaatgggttacttccataaccttttgggtcactatttcacttgcaggcagtttgctgttgtgggtcacaaggtttgtaacttggtgatactgatgattatctttgtcatctggtagctagtatgcagagtaccttccagtaccatgaacactaatcagaagcttgtgattcactaccagctcaacctttatgtgttcagtgacatatgttaatgttgtctttagcaatagagccttaccatcaggttgtgaggagtaaccaatagccttagcaatagactctaatgtttgatgggtttcatgggacccctttgaccagtgactcaaaaagatgtcaccaattcctggcaatggaagttttagttggtggtgtaagatgtcaaattgggtcattacctaccccattatatgatgtctccatttagattcctttcatacatgtatatattttaggaagtttgttttttttttatagcagtcagtttgtgtgtgtgtgtgtttgtgtgtgtgtgtgatttccaaaagactgttactattagttattcctccccatattcccttatttagacttctgtcctagttaggatttctattggagctggcttgcaggtcacaagtttagttcattgttatcgtggtatcatggtggaagtatggcagcatgcaggtaggcatgatgctggagaggtatctgagagttctacatctggaaatgcagtcaacaagaagagaaaatgacagtgggcctggcttgggcttctgaaaccccaaagccaacccccagtgacacacttcttccaacaaagccacacctacaccaacaaaaccacaccttccaacagtgccactccctgagcctatgggggccattttcaatcaaatcaccaccccttcccatttaatccttccactctagttttggctttatttctccataacactacattctatttccacttccttgggagatcctttcctcccacctggtgcctcactaggtacctaacctttgtggttgtttggattgtagcaatatatccaaagcttaaaagataacattcacatataaaagaaaacacacaatatttgtgttacatcactgaggatgattatttactagctctatctgtttacctttaaatttcatttttattaacagctgagtaatattctattgtgtagatatatcacactgttggaatacatggctggctggttagacatcgcagtctgccaaggcttggcaacacaggaagctcagcaaacatgggactccctccctctccagcaaagcttcctgctctttacctagccttacctgggcctgaaggtctcaccttatctgaaagctgtctctaaaccagatgtctttaccttggaccctgacacgaatctaagctggaaggctcccttactgcacacactaggagccttatgatagaagtgaaagacccccagacccctaagggcctcaggatcccgaggagcccccaagactcagaaaccagaccaagagctgcaaaagcaagagggtttattgaacaaatgcgcattcgggtgtcagcaatatcgggaaagctgcacatcccagcaagggttacaggctccttatataggaaaaaccgcagatcagcatacaggcaaggggcacaaagtgattgcttacaaagtatgatctcatgttagagtggtcacccaaaaaggaaaaaccacagaacgtgccctggaaagtccttgattgtctgttggccagccaggtgtgacccaaagagggttgtcttggcgattgcccctgtctaaaccataggatgtgcccagggttggggtcaacttccttgtagtgggccaaggcctgtgggaaactttttctctcagcaaactaaaatctttcattcccccatttttttttttttttttggtgaggttttaatcctaaaaacctatggtcctgcttattgtctgagagcctgatattactgatgaagaactagggggagattagggtagtgagccaaggggagctgttacatcatccttttaaccagccttgttgggactcccgttcctttcgctgctggttgagtctttctctgagcttggccatggaatccctaataactccagaatgattaacatagaaatagcactcctctttgagggcagcatagagcccgccttccttaaggaaaaggagagcaagtcccctatgattctggagggcaacttctgctagagaagccaaagactttaatatccttatctatggctgtttttagctcattatcgtggtggggtccctggaccagtgctgtggttccggtgccgaccccagccatcatctccgagtccccatcagggagtgagagatattggcatttttccatgtaagggagttccttttgacttagcattttaaccagggaaaatgggcgacatattctttcttattctacttcctgctgactttgggatgaagttagggatccaagaaggctgaagtgctagtcaaaagcaaaaaagggaatttaggcaatggggaatccatcaggagcttctggttggcagactctgttgcagagatagggggtgcccatatcagctggactggttcatatccatagcaagtctagggcttgcaatctttaggagcaggctgtagtcagcaactgatattcatctgccagaagtggaaatctgttgagacatgtttaaactgggaacagaagttaaaacttatatatcttatttgaactcttaggcccatatttttagcgataaaaaggacaggagttccaagacaagggagaaaaatcccatcctcaggaacaaatagatgggataacaaaagttgtacttatctggagtcctttttttacctgagagaagtggatccaagctttatgacttattgatcctctgaagcctatatgaactttattatatcataggacatagaagttttagacattttatcattaccaatctgtattgaaatctttattgtagaaaaagcagatattgggtatgaatgacagaaatatatttatatctttgagttctagtaaaaactacagatttgggttagaagcttgtatatttttcttctgttcagagagtcaggtatagattggacagaggtgcctttggcctgatgaaaagccctttaagtttatatttagatgacaactaaagtaaatctaaaaaccttgagcttgtgactgaacagcaggtagttggttttatcagcttatcagaactttattaaatgagctattaagctggctatagtttaaccattaatactatcagagatctgagaaggacaaattttatacagtttttgaatccattaaaaatgacagggtccagtccatataaagttagccatacccatgtctcaacagtgttgggggcagaagtaaatctttgccaggtccataaagtgagttttttctctctgtggaagagagacatggaaaagactgaccttattttgtctaggcaatggtggtgcaatcacttttccagtgtcctgtagcctgtccacagtctgagcccggtcctgcctggcagcaggtgtagcatctgagtatcatgctcattggtcagcattgtcgtaatctatggagccccataatcttttttagagaccttggtcactgtcaggatctggaattttctgtctgatattataaatttttagttaacattttaaatgtcatattctgcagatctctgcagtattagaagtctgcgtaggtaaatctggcaacttgtttatttataagaatggctaataacttgtattttttaatatcttataacaggttagcagcttttataaaactaagactttatatttaatcaggtttatctttaatcaatgtaaacatctgacaatgtaaacatctgacatacaggtggtcttaggttgcccttataaaagagttttgtttttaaaattctaaagaattgagacccatgggcttagaagttattttaagccctttgttaaacttaggtcattgtcctcctgtaccataagaaataaatagctcaattttttattaacatatggaacttatggctgtgatcttaaattttagcttttttgatttaagtataaatattaacaatatagcagaatcataaatatcttataaccttataaatttgaacatttaaaaatcctttaatgtctttttgtaagaatataaaaaatgaagtatccttgatgtgtttaaaattattatcatctgggtgactattaaatttatgatgtcaatttccagtgttattagttataactttttgacagatttaaccatgaaacagttttaatattatctttattaaaaagacatctgaattcttgataacccaaatttaatgactagagctcagagataaattctgagctatgtccataaatgactggctgctgttagaattagacagtaaaaatatttgaaccatttttgtttttttgttttggcttttggcttataataaaatatatgtttataccagaaaacatagatagaaccttttaacaagtatacagaattaattttgggggtgggatataaataaaacttttaaacagaattaacctggtgtggttaaaatttttaacctgtattactattataaatagatatgagagcccatagtaaacagtttacattcttctctgacacttttacgactttctattgacaaatctgcgcctttttagctgaggcacggtaccccagggtccctagtttctccaaaagggcccagtaccttgtttacagttctgttcagtccgggctgccagcaggaggtcatctacacattgcagaaggatcagggtagggtgctgcatccggaatttaagttacaatgaaagggcccacccaaggtggagggttgtgggccaggtcttcccaggttatgatgtagggaacctggtcggggtgtctgtggggtccagaattgaacaccttttattttacctgtaaaataatcttaagattaaaagaaccatcccgaggccagtcaacattaaatgttggccatttggaactgcagaaagtttgtcatttttttcttcttgacgtccagggactggttgttggctcgttcccaaacgtctccccaatggtctagagtcaaacttaaggggttgttagttgttgtcccatggtggtcagatggtgaaaaacaaaaaagacaaaaagacaaacattgagacagacagtcaggccaaataacagagactgcgcagctacagatcagctccaagccgaaaccaaagattcagatgggggcagaagacttttgtcgactgctcccagggacgagggttgcctgcttgccctctcccattcagatcacccatggagcgtccttcagggtcggactcagaggggaacgactcgtcagtctaccttgtgagtctctacagagcctgcatagcctatacagggcttccgggtggacagacaaacatagaacatgaacataaatgtgccggccagacttaacctcctcttggttgtggtaatgagtctggggtctcctcaaattcccagctcctggctggctcgccaaatgaaagacccccagacccccaagggcctcaggatcccgaggagcccccaagactcagaaaccagaccaagagctgcaaaagcaagagggtttattgaaagaatgcgcattcgggtgtcagcaatatcgggaaagctgcacaccccagcaagggttacaggctccttatataggaaaaaactgcagatcagcatacaggcaaggggcacaaagtgattgcttacaaagtatgatctcatgttagagtggtcacccaggtgtggcctgcttttctacaaaggaaaaaccacagaacagtaccctggaaagtccttgattgtctgttggccagccaggtgtgacccaaagagggttgtcttggcgattgcccccgtctaaaccataggatgtgcccagggttggggtcaacttccttgtaatgggccaaggcctgtgggaaacttttttctctctgtgaactaaaatctttcaaaactttttctctcagcaaactaaaatctttcaaaactttttttctcggcaaactaaaatctttcaaaactttttctctcagcaaactaaaatctttcagaagcatgttttttaatgcaaattaggtgatgccccagccactgtccccagcctttatattcccctttcctcctggaataaaggggagttggagttgtaacaaccgtctccccagagagcagtctctattcactcacaagcggtggactctattttgtttcggctccctcctacttggctgaagtgatgatcccatctggaggaagaagcgcagctgatgcagagaatgggggcttagagatctcatggagggagggacttatggatcttgtggagtgagtaccctttaacaggtagcagcgtttttttctggcctggctttcttcgatagaggaccccagttaactatccctctcccttcctctctgctataatgtctggtttgtttcttcgcataggttccgattatggtcattagtcttttggtcatgtttactctctgacattgactaatgtcagatgtctaatgtcattgactaatgccttctacctgatttccggacttcgacggcccaatttggtttggacaaagccttttattttttctctcttgtacaaaacctggtaatgcagctggcaggcttgaatttgctggggtgattttgtacctccctaccctctgaaagttggaatgtcactgacacatttcctttctctatagtgggaaattcaacatcatcccagagtgatatccaaatctgttcccttagagccttacttaaatcaagaggatttaaaatctccccaaaggaaggtctagagttctcaaatgaggttcttaaatttgcaccctgggtcctgtcagcagatatctctgatgtttggacccaagtcacatatttggcttgtaaaaaagaaatccaagaagactatcccttgccgtcttcatcctccctataatagctgccattaggatgaccaattagagaaaaacaacagggagacaaaggtacagactcaaatgaggaaagacctcaggataagccactagagaaaaggcacagagagacaaaggaacagactcaaacgaggaggaagaccctgggaattgccttatgtctgatttagctgccctgaagtgattgatcaaattaggtgaaaattacttctcaatccaggacaccctgcccctctctagatcccttccccttatgagccctcattggctccagaggacaaaaaaccagggtccttgttgattacagagaaaaaagatctgaataccaaggaaaaggccctttataagactcagatgaacccccacccaccctcggtgccacagtctatggcagttctccccatggcagctctacaatatcagagatactgggaacaatagtccccagttccttcagcctctatggtccaggaatccaaagtctccatcctactaatctatgggtaacaaggcagtttccgtcagcctggtactccctcttggaaacagatttaaaagagttaggtcaagctgtccaggagaatgtaattcatgccccttggacctaggctattacacagaatttcaatagcacccttttaactcctcaagactggaaaggcatatgtcgattcactcttcccagccctctatttgtacaactggatgccatgtttagagatgaatgtcaaatgcagactagaaaaaataaattctgaattctataatcaacaaatacgactacaagggcatcacctgccccctggaccccccattcaattgtctaactggaattacgaccaattgtttggccagggtaacttttccacaggaatacaacaggccccactcacaatagcttctttgaacaggcccacctatatgtgctccaagcctgggaccatttgacttgcctatccacaggacctgggtaggcccctttactgacctaaaaaaaaaaaaaaaaaaaaaaacccaagagaaactcccagattttatactgagaatacaagccagtctagacagaaaaatgatagaccccacaaagcaatgttcctaagcagtcttgtctgggaaggaatgaccctggagcacagataggcttgtcacaacctaaaaaatgaccactatcataaatggattgtggttactcatgactttggactgcctcacataaagcctcttctctttcccaagcctttgaagtagcaacacaagctacttcaagatgttttaaatgtggacatataggaaattggaaagtgggggtgcccaataaacaattcaactgcctctgaaccccataaactgtctgtgccccccatgttgtaggtaaggctgccactgtagaaggaatttcaaagctataactggtaaagaaggcaacccctatgcctttaaattctacagggggcagtcctcagccctgccattaagaggggaagaccctggtgtccactgggtcactaacatacttgagaattttcatccaaaactttccattaaaattgacaataaaaatttcaaatgtttgatagacacaggcagacaaaactatcctaagctgagttttcaccacattggaccttcctacctggacctcaactaatggggggtaggaggtctcttttaagtatttattacccaagagtgtaaaaaggagttgttaactggtctaaataataaaaaaccaggagtcatatatggagggaaatgctgagaaatcagagagaagaaggagcaagccaaaatcacctttacctcctttccatctcagtcagcaagagagtgagtccctgtttcttcctgcttgtgttatcctctttccgcccagtcatctcacttcctgtatgtctgtacagacctccagactgctatgattagcaatcaagctccatcctctgatcttcagactggctttatttgtacaagcaagatatcaccacacgagacttttacagatgtgaggatccagatggaatgaatgggaccattaggcccttagttgccaacatgggcactaacttactaggaagagatcttctagaagacttaaatgtggtccttgctattaggaaagaaggaaaatgcctccaaataaaagattaccagagccggtcgttggtggtgcacgcctttaatcccagcactcgggaggcagaggtaggcggatctctgtgaattcgaggccagcctggtctccagagtgattgccaggatagactccaaagctacacagagaaaccctgtatcgaaaaacaaagaaacaaagaaacaaacaaaaaacaaaaaacaaaaaaaagattaccagaaatgttgagatcagaagaacccccaatcctaagggccactagagaatacctcattctctgcctagaacggatcacagaagattccgtctgggcagaacagtgtcctttaaatgtgtagaaattaactattttataacaactagttaaacgtcaattgggcatgggacacattcatccttctgtaagcccctggaacatcccagtttttgtaagttaaaagatgacctggacctggaggttcctccaggatccgagagcaaataataagaccatgaattagttggggttcacctcagcttgacctctcctttgcctctgccataccagtaaataccccaatattagttttagacattaaagattgcttcttttcaaaaccactccatgaatatgattgcaaacttttcaccttttcaatacctaaaatcaacaattcaggaccagctgatagatatgagtggactgtacttcctcaaggaatggccatttccccaacaatttgtcaggaagctgtagtccccattaaaaccctttatcaaattaagtggccacgtgtatccttacttaatgtggcaggacaaaagataggatcaaaattaaccttagaaaatctcaaccaacaagccacaaaagccctgaaagaggttttacgagaacagaagataaggtccaacttgtttctcccattacattcctggggacagaaattaccctaacctcagtccagccagctaaccctgttattgacttcggaacccagtaacttcaaatagccttcaaaacttcctaggcagtattaactgctgaggtcttggttcctcatatatactggccagccagttgcagactctatttgatctacttaagggtgacaaaacccctctttacctctctccctgacaccagcagctaaagaggtgctttgttctgttaacaattatattaaacaatgcttccctggccagttatgtttcacaacagccaacccaagttcttatatttaattcctcactcttggtagttagaaccctattccagcctcaggggggtctcaaaatggctccatacaccaatagggggaacttctcgattattaacagaggtaggggactagatcaccacatgcccttattgatatagtccagtgcagctttccattattccattccctttccattattcttatggctgtttctgctcttttagatggtaaagatcatgctctacccagccctcctaatcttcattggtgtttcttcgttagggagacctcactaagctcacaacatcattacaggttctggggactgtccaattaaaggatgctggaatgtggtctcctttgtcctctaccccaattccaccaaatgttcaaacgccccattcatttgcctcccatgcagacaattcagattcaaacaagaatgttgggagccaaagatctcagggcttggcttgagatcctgggccattcttggatggctacatagttgtatattaacctttacatagcagctccttagaacctcagctcaagaaaagaaacaacttgacccaatcctccacccaacaggctcagtcacctaggcaacccttccaggacctcttactcataaactctttaccctgccaaacatcctctttgtgacttcctaacatcctgcctacactaacacctggtgcacaaacaacccattctacccctccccatatcctgctctactgactatataagctagcctgagaaaaataaagtttgccacttgatcagaatcctgtcttgtggtcgttctttctgtgtctcttgtccccatacactgtccctgactctcttgccccaggttgatgtcctgcaggtctggacacaagagtgcttggccgaagtagacacataccggagatgcagaacggtattgtaaatggaagagtctcgtcatattaacactatgttttcctcaaggaaagctgacttcacaatacctgatccctggactgagtgctggtacacaggagttcaggggaaactttatgcttcacccataactcaaacaactgtggttgatctttatgtgtcccaacaatgggttgtcctggcatcccaacccattctaatgcatcacaatattctctcatgaaaaacaggttcatcaacagatcaaagccactgtcacatggaatcaatacatctaatatgttgctgactttctcccttcaccatccacactaatgccgctaacagtttttttttctttcttttttttttttttgcatccagcaatagacctctactgatggctgtactggtcaataccactctcctttaccccagggcccacagaaatttcactagttcttgcctgtcagatattcccctatttggctatccaactattgagtttttatttccaattgggacaaacccacttgttaccaatgtcttactaacattactctttctaggccaacacgtgttgtccctccccttcttctttggtgcaagggaaatgcccaatcatgtgttaactcttccttgtccaccttgtgcatacctgtaacgattatcccccaggtatatctgtttgaggaagaggaaggcattctcctcctctgcaaccagtcacagagaaagacttttatccctttgctagtggaaccagctcaccctttctctgggtacaggaggagctgcaacggctgtcattgcacagacccatcctctggcctgggactttcaagacaaacttgaccaagccacaacatctacagcctagagtcacctcaaagacagatgaactagagttgtgctctaaaatagaagaacatagaactaataactgcagagcatggaggaatgtgtatggtcttggaagaacaatgttgtttctttgtctgtgagtccaatttagtggcacaaaatgtaaagacccttaaagccctacacaaatatctcctggcccggtatcagtccaaggaatctttatcctggttccttaatcctttattttcttggctcctaccatttattagtcctctgattatgctatgttttgttttgatacttgccccctgtcttatttagttcctctggctagagatcatgaccattgctaaaattactaccaatcagatcatggttcacttccaggtcctggacctttctgacacaggaaacaggttcctcaaagtttatgatgatacctgtgcattttaaaaataaaatggggagatgttggaatacatcgttggctggttagaggtcacagtctgccatggcctggcagcttatcgaaataagctcggcaacatggaactccctccctccccagtgaagtttcctgctctctgcctagccttatctggaggatgtccatgggcctgaaggactcaccttatctgaactatatctctaaaccagatgcctgacttatctttaccttgaacccttacacaaatcctagctggaaggttcccttactgcatacactaggagtcttatgatggagcatgcttcttaatggaaattaggtgatgcccccagccactgtccccagcctttatattcccctttcttcctggaataaagtggagatgtaacaaccatctccccagagagctgtctctatagactaaatcacaagctgtgggatcccacttacttgttttggctacaccccacttgggagaaatggctatcctgaggaagaatcttgaagagaactgcattatgcttccccaatccatttatctgttgatggacttctaggatatttccaattactgtctatcatgaatagagcagcaatgatcatagatgaagaagtgtctctgttgtaggatattgagaagtatagttggatcttgaggtagatctattcccagcttctccaggaacaaccatcctgatttccatatttgttgtaccagtttgccctcccaccagcaatggatgagtgttcctctttccctgaatcctcacagtatgtactgttatttgttttattgatcttggtcagtctgtctaaggtgatactaaatcaagtagttttaatttgcatttaccctgatggctaatgaagttgaacatttctgtaaatgtttctcagccatttgtgtttcatggttgagacctctcttcttagttctctatcccatttttatattgggttgttttcttcagacttggttttttaaaagaattttcaaaagtattctagacactaatcctctatcagatgtataatcgataaaaatcttttctaattctgtaagctgttgctttgcctgaatgatgatgtcatttgccaaacagaagcttttcagcttcataaggtcctatttatgaattgttggtcttatacctgtgctatccatgttttgttcagaaagtccttccctgtgctaatgagttcaagcttactcctcactttctcttctctcagattcatggtatctggtcttatgtggagctctctgatccatttggagttgagctttgtgcaggatgataagtatggatctattttaattcctctacaagccgctatccagtttaaacatcaacatttgttgaaatgctctcttttctccactatgttttttgattcccttgtaaacaaacaaacaaacaaacaaaacctcagttgtccctaggtgtgtggaaatagtctgggtcttcatttccattgatcaatgtgtatgattttatgatgatatcatgctatttttaatcactataactctgtaatacaagttgaaatctggaatgatgacacccccagtagttcatttattattcagtattgttttagccattgtattcttctttgtgtttgtttgtttccatatgaatttgaagatttattttcacagttttaatcctactgattgatgggcatgggaaatttcttttttcttttctctttctttctttctttctttctttctttctttctttctttctctttcttttttttttgagatagagtttctctgtgtagccttggctgtcctgaaactaactctttagaccaggctagccttgaactcacaaagatgcttctgctttaatcccaagtactgggattaaaggtgtgcaccaccatcacccagctctggaaagactaatattttaacagaaaggactcttgtcaaggttcaagaggacagtgtcctgggtgctggatgcttgatacgaatactccctcagtttccctttctgctttgagttctcctgccctaaccatttctgcttctagttaatttgaacacagtcatggaaatctccagcaaccactaggtctcacatatgacaagaatctgctatatactcgggcattttggcagtgtcactttttgtgcacatgctttcacttgctgtgtaattgatctcctctatagaaacatcataatgcttatatttgttttgttgcttccatgtgatctcagaagggagggtaggcaaatgagtatgctcagaaagctaaaatttcaaaggaaagaataattaatgatcagtattatagttaaagaaatttcaaacagttaacttgttcttatcagcatgcaatattcatcatgcttagagtgtctgcttttagcaatagttttatgttttggtatttgaatacattatgaagtttttgaaattattcttttgggtaaaaaatattctgtgctctgggaagtctgtatagttatgctcatgaacttgcaaaagttttcatagattcaatcaaatagcttttattcagatcaaataatattctggtcaaatattgtagcatctctcaaatagcctgggaaagtttgaactactgaagagctaggaatgcagtttgtgtctaggtgtctcttatagacagctccactgtctgtcacaaattcccacactgaccaccagaggacactggtttcaatgacttaagaaagaattactaacagttgtttagacaactgaaatcttatctgctcacatcatgagtacaatgggactttgttatattgagcctgggaaagtgggccttgtttaccatgaattttcttgctaaaatggaagtggaaagttacttgcctacaggagagtgaatacaaagtattaaggagtgttggagacaaatcgtattcaagggaaagagaggagatcaaatactgaaaaagaaatagaaaaatgtgaaaaaccaagttgataaaaggaagagatggaaataaacaagatatagaaggaaaaaatgagaagtgaaaccttcatgtgatattaaagcaaagggctatgatatggaattcccttactcatcccctggtcccctgccgagctttcttaggtatgtatcaggttgaatggtggtgcccatgtagtcagctttctgtctataaagatgtacctgagacaattggcttagaaaagattatccaaactcaggtcaggaggttttaatggtgggtttggcagaacttttgctttgggccactgctggggttaccagatagcagtgatggagcatatatgaaaaagtacttacctcattgccagaaaatgtgtgtgcacgcgtgtgtgtgtgtgtgtgtgtgtgtgtgtgtgtgtgtgtgtgtgtgtgtgtgtgtgagatgtgggaaattaccaatacaagggaatttaatagggaaaagccttacttagagagtgacctagccagctagcaaggcagcagtaagtacagcaagccaaagatgaaagtgaaagcagagcccaccacgtgagtgtcccacactcttttttttttttttaatttatttattagttctagttaaggagcaagcttgtttcacatgtaagtcccttctctctctccctcctcccttcacccccatccctcctccccacctaccccccaccccatccacccaccactccccaggcaggatagggccttcaacgggggctctgcaaagtccatcaaatcttcctgtgctggtcctgggcccttccccatgtgtccagggccagagtgtaacccttcacgtgggataggctctcaaagtcccttcttgcaccagggaaaaatactaatccactaccagaggctccctggagtgcagaggcctcattattgacatccatattcagggatctggatcagtcttgtactggcctcccagacagcatctggggtcgatgtgctttctcttgttcaggccaattgttcctgtgggtttctccaatcccttcgctcttcatttctccctctcttcaattaaattcccgatttcagctcagtgtatatctgtggatgtctgtctctgcttccatcagccactggatgagggctctagaatggcataaagagaagtcatcaatcccattttaggggaagggcttttaggttatcctgtccaccattgcctggattgtcagatcgtgtcatccttgtaggtctctggagatctccctggttccagatctcttctcggacctatagtggctccctctgatatggtatctctcatcctgctctctctcctctattcttcccccaactcaatatttctgctcctccatttcctctcctctactcctcttctcttgctcttattgtagcagctccctctcccctaccctcatgctcccaattagttcaggagttcatgccacttccattcctggggaccatttatcccttagagtccttcatgtttcctagtttctttggtgaagagcattataggctggtaatcctttgctctatgtctaaaattcatatgtgagtgagtacataccatgcttgtctttttgtgactgggttatctcactcaggatggttccctctagttccatccatttgcctgtgaatttcaagattccattgcttttttctgctgagtagtactccattgtataaatgtaccacattttctcaatccattcttcagttgaggggcatctaggttgtttccaggttctggctattacaaacaatgctgctatgaacatggttgaacatatgtccttgttgtatgaacatgcactatttgggtatatacccaagagaggaatggctggatcttgaggtagactgattcccatttttctgagcaaccgccataatgatttccagagtggtcttacaagttcacactctcaccagcaatggaagagttttcctttttctccacatcctctccagcatagattgtcattggtatttttgattttagccattctgactggtgtgaggtggaatctcagagttgttttgagttgcatttctctgatagccaatgattttgagcactttcttaagtgtctttcagccatttcagattcctctgttgagaattctctatttagttctgcaccccactttttaatttcattgtttggtgttttggtggctagcttcttgagctccttatatattttggaaatcagtcctctgtcagatgtgggatcggtgaagatcttttcccattctgtgggtggtcgttttgtcctactgactgtttcctttgccttgcagaagcttctcagtttcaggaggtcccatttattaattgcagacctcaatgtctgtgctactggcgtaatgttcaggaagcggtctcctgtgccaatttgttcaagggtattcccactttctcttctagaagattcagtgtggctggatttatggtgagatctttgatccatttgcacttaagttttgtgcatggtgacaggtatggatctatctgcaatttctgcatgtctgaatccaattgtaccagcaccatttgttgaagatgctatcttttttccattgtatagatttagcacctttgtcaaaaataaggtattcgtaggtgcgtgggtcaatatcagggttttcaattcgattccattggtctatctgtctatttttgtgccaataccaagctgttttcagaactatggctctatagtagagcttgaagtcggggatggtgatgcctccagaagatcctttattgtaaagagttgttttggctatcctgggttttttatttttccatataaagttgagtattgttctttcaatgtctgtgaaaaactgtgttgggattttgatgagggattgcattgaatctgtagattgcttttggcaggattgccatttttactatgttaattctacctatccaagagcatgggagatctttccattttctggtatcttctttaatttctttctttaaagtctcaaagttcttattgtacaggtctttcacttttttggttagtgttaccccaagatattttatgttgcttgtggatattgtgaaaggtgatgtttccctgatttctttctcattggatttatcatctgtatatagtagggctactgatttttttgagttaattttgtatcctgctaccttgctgaaggtgtttatcagccgtaggagttccctggtagagtttttcaggtcactaatgtagactatcatgtcgtctgcaaatagtgaaagtttgacttcatcctttccaatttgtatccctttgatccccttttcttgtcttattgctatagccagaacttcaagtacaatattgaagagatatggagagagtggacagccttgtcttgttcctgattttagaggaaacgctttgagtttctctccatttagtttgatgttggctattggtttggtgtatattgcgtttatcatgtttagatatgttcctgttattcctgttctctccaagatctttatcatgaagggatgttggattttgtcaaaggctttttcagcgtctagtgagatgatcatgtggtttttctttttcagtttgtttatatggtggattacattgatggattttcgtatgttgaacccccctgcatcccggggatgaagcctacttgatcatggtggatgatttttctgatatgctcttggatttggtttgccaatattttattgagtattttagcatcgatgtttatgagggatattggtctgtatttctctttcttagtcatatctttgtgtggcttgggtatcaaagtgattgtagccttgtagaaagagtttggcaatatcctatctgcttctattgtgcggaacagtttgaggagtagtggaattagctgttgtttgaatttctggtagaattctgcagtgaagccatctggccctgggctttttttggttgggaggcttctatttcattaggggttataggacgatttaaactgtttatctgatcttgatttaattttggtaagtgatatttatccagaaagctgtccatttcctttagattttcgaattttgtggagtacaggttttcaaagtatgacctgaagattctctggatttcctcagtgtccgttgttatatcccccttttcatttctgattttgttaattagcatgctctctctctgccttttggttagtttggctagaggtttgtctatcttattgatcttctcaaagaaccaactctttgtttcattgattctttgtactgttttcctagtttctactttgttgatttcagctctcaggttgattatttcctggcgtctactcctccttagtgtgtttgcttctttttgctctaaagctttcagttctgtcaattctctaatgtgactttcctccagtttcttcatgtgggcacttagtgctatgaacttccctcttagcactgctttcagagtgtcccataagtttgggtatgttgtgtctacattctcattaaattctagggagtctttaatttcttttttttatttattcctcaacccaggaatgatgcaattggttgttattcattttccacgagtatggaggttttctgcaattcgtattgctgttgaattctagctttaatgcatggtgatctgataagatacagggggttatttcaattcttttgtaactgtggaggttggctttgctgccaactatgtggtcaattttagagaaggttccatgtgttgctgagaagaaggtatattcttttgtgtttggatggaatgttctctagatatctgttaaacccagttgggtcataacttctgtcagatactttgtttctttgttaaatttctgtctggtagtcctgtctagtggtgtaaggggggtgttgaagtctcctactgtaagtgtgtgtggttttatgtgtggtttgagctttagtaatgtttcttttacaaatgtgggtgccttcgtatttggagcatagatgttcaggttgagacttcatcttgatagacttttcctgtgatgagtatgaaatgcccttcttcatctctattgattgcttttaaagtctaatttgttagatattaggattgctaccccagcttatttcttgagcccatttgattggaaaatgttttcccatccttttactctgaggtatcacctgtctttgaagttgaggtgtgtttcttgtagacagcagaaggatggcttctgtcttcatatccattctgttagcctatatctttttatgggtaagttaagaccattgacatttagggatattaatgtccattgttcattggttcttgtttgttttggatttattgttggtggtgtcattgtgtgtggatttcaccctcctgtttctttttgtgtttggtaaaattagattatctattgcctgtgtttttgtgaatgtagttatgttcattgagttggagttttccttccagaacctcctgtagtgctggatttgtggatatgtattgtttaaatctgtttttgtcatggaatatcttgttttctctatctatagtgattgaaagttttgctgggtacagtagtctgggttgacatccatgctcccttagtgcttgtagggtatctatccaagaccttctggctttcagagtttccattgagaagtcgcgtgtgattttgattggtttgcctctatatgttacttggcctttttcctttgctgctcttaatattttctctttattctgtagatttggtgttttgattatcatgtgtcaggggaacttctttttgtggtccagtcggtttggtgtcctgtaagcttcttgtactttcataggcatatccttctgtaggttggggaagttttcttctatgattttgttgaatatgttttctgtacctttgagcagtgtttcttcaccttcttctacacctattattcttaggtttggtctttttatggtgtcccatatttcctggatattttgtgttagggatttgttggacttgaggttttctttggttgatgaatgtatatcctctagtgagtcttcaatagctgagattctctcttccatttcttgaattctattggttatactcacatctttagttcctgatcgtttatccatttccagcatcgcctcattctgtgttttctttattgtgtctatttcagctttcatgctttgaactgtttcaagaatttccttcacttgtttggatgtttttttcttgggattctttagaatctttaagagatttctttattttttgaattttttggtttgtctttgcctccattttgtgtaattttttgttttctttttcttctatttctatcagggattttcttgtttcctctttaaatgtctctatcatcttgccgagataatttttgaggtccatctcatcttcatgctctgtgttgggcttttcagatcatggtggagtggagtccctagattctggtggtgtcatattggtctttctgttgttgagtgaaatcttactctgttttcttcccatatcttcttctagtgggtgtaggtggggtctctctatctcctcttgtgacccagtggtgtgtgggggccaggaatgcaatgtctataactctggatggtcttgcctctcctggtagtctcctcactcattgtggattggttggcagaaagagatggaagagtggggcatttccagattcagggagctcctccttgcctgtgcctgtatatcccaagcaggcaggtgcaggcctggggaggtcggggtgaatgatggtttggacgggggttgggcaagggcagaggctcactcacctagttcctggttcggtagacggaaagggatggaagagtggggttctaccagattcagggagcagggagctcctccctgcctgggtgtgtctaccccaagcaggcaggcgcaggctgggtgtgtgtgtgtgtgtgtgtgggggggttggggtgagtgatggtttgggctgaggttgggtaagggcagaggctcactcaccttgttcctgggtcggtcggcagaaaggcaagtgcagaactttctgcttggcatgggagaccttgtgcctgtgtttgggtctgccttactaggtccctctgttcttgcaagtgcctgtgttgtagacaatctaggatgttactgccaaccacacctgtacaccttttcttacagtgtttcaccttctcttccctctcccttcctaattcttcatgtttaaccctttcaagatttaggtgatgtcctgtacctcttgtgaacagattcccacatcttccacccagattacaaacttgcttatttgattcttctctgtagcatgataaataaaagacccagagacagatattggggttcaagcttcaagctgaagatcagagaagcaaatcagtcaagttgggagattttacttctacccagctgaaatggcaatcctgtctccacagatcctcagagacaaaaggctcttacttcctgtctcctcctccttatattcctttctctgcccagccatatcctcctgtctccacctccctagtgctgggattaaaggcatgtgatcccaggtgctgagaccacctttgtgtgagctatttcttttaggaatggatcaattccatgtagtcaatgtggccttgaattaacagagatccatctacctcttaatcctgagtcctgggattaaaagtgtgtgcctggtttctatggctaaccagtatggctgctttgctattttgatccccaatgtctttaatagagcaaaaacaacatatcaccacacttttcttaatatacttgatcttagtaggctaatttttgactattatttaaacacttcttaaataatctgcattttcataaactggtgatcccggagggcaatgcattctgcttagtctccagtgcctttcatatactttatagctaactcattggtgggatttgtaattatgtgatgtgtaagagtgttataaatgtggtgatggcaattagtggtggttaggggaggcatgctagccagggattaatcaattgtacaaggtacaattacatcagaagagcaagttgtgatgttctattgcacataggatgatgagggaaataacattgccctgaatatttcaaagtggctagaagaaaggacctttgaatgttcttaccccaaagaatttataaatatattaaaggacatgctactaaccactctgatttgattgctacattatatattcaagcacagaaacaccacattgtgcctcataaatatgtggaattattacttgtcgatttaaaacaacatgcaaagaaatccacagtaatcaaaatactgtagtgctgtgttgtcctgctggagccctaggtcaaaacaacatatcaacaacaagaacaacagcagcaacaacaaaacaacaaaaattccaaagcaataaccctagtttcaggtcttaaaagtccctacccagagactaaaaaatcatgtccattctcaggaaagcttctaattctgtccagcagagggcagtggtacctaagtaaacagcagtaccttttcctgtcatcttcatcaatagtcttatttccatgaggaatgaactgaagatgaaaggcttttgctgtggcattaggctgtgatgtcgaatcttctgctggagcagaattaaaccatcttacatccaacttttcttttaataaatcttttctagatttgatttgaaatgtaggccaaatctaggccttactatccatgaagtcacataggaagtagcactgtgtacttctttagaacagctgtcaacatctggttggctcttcattcattgcaccccaaccctaatcttaaccataatcataattctctaactccaatctttcttttattatagatttggagaccttgtaggggagctgctgtctcagagagaaagatccatcacttgcttgataaagaagcaagaaaacagatgcaagagataccagtcaacatatttgatagtttgctcattttttcatttattttctcatttattcaatgatcttgcaagcgtttatcatctatcagagtaagtattttggtggcagaagtagacaggatgcctaacataaatcacaatgttcacctttcaagagtaactaaagaacagcaattaatgacacaaatattcaagttaatatatagaggtatagataaacattctgggaactcatctgaataataagcaacaggtcctcatatatttattgttaagaatatttttataagaggaaatgggaaaatgggggggctttaattgggacagaggaggaaagtcaattttaaagaaaagggggagagcaggggaaaatggcactgatgatatctgaaaaagtcctaaggaattatgccattattcattgacctagaattacatgcaatacatataagtctatgtgtatacatacacacatatttatatatacttatatagtttaaatgaaattgtttcatttgggtttaaaatgctctcaccaagaaccatagaatatctaataaaaccccaacatgtgacactccctttcagttgtcagttaggagagtccaagaggcactccaaatgatataagctattgctgttgcctttggttgtctcccagaggtggaaggtaggtttctataagtgaggacaccatgcatgtcaggtgtcctgagctggatctgacatggcaacctcctccctgaggactagctttaatagtagcagaaagtgctatgcaagctgctaagggagagaagcaactaagagtcctaccgtgctgtgatgcctatgaaccacagcaagagccagcatgtcaagatattcccaaggatgcaacaatggcactcacttagaccttagtggtaaccaacagctctctctaattggatttgaggtcctctccagagctgggaaatcatatctgctattggaaaccaagccaaatacctggggctaatgaggtcacatatcttagtggagaacctactacccacacatcctgaaccagcatagttcctaaattcattctaaatattaaagctcatacacacaggtaagtgtagcttttacctcttgaaggggaaatcctgtttagaggtaatgctggccacgcctgcttggggctggtcacaggtgtctatgactacacctgattgggtatggtcagagtgatgtgggaaaggtttaagtagtttaggggtacacatgggggccacttctctcactccctgccacatggctaagtggacttgtgtgagtactattattaataaactccctgcaatcaatctagatctgactccacattgtgttcggctttatttggtatcagcagttggatcacaccacagcccctacccttttccctgatcggagcacctacacaggtcacctgccggatctgcccaaggcccccatccttgtcctctgagctggataagccaccgctgtccccgctgctcccaagcacagtttccacccagtactttccatgggatttttcccaacccctgcctaccagtagccactgccctagcaaagcccatgccttttccatctgttcttaactaggtccgaaaggctttcagatatttttcagttactactcagaccaacttaaaccatctgcagctgaacactacaccaccactactggccacctgcgccaccttctggtcaaatgcagttactgcatctggagtatcagccaagaggtaaaatcaattatggcagatcacctgacattgcaaacaattgggaatattcttgcttcttacatgaattcaatgttagaggaggcttatgacttaccagttacatacctgtataccatgttagcagtcagtctcataattcatgtggtatctctaaccagaggcctgagaaacagtgaaaaggacagcttagcaatttggatgcaggacataaaagccagtcaggaaaacttggtatctgaaatgtaagacatgcaatacttacataaagatcttgaaaatactaagtctagccatactacattactaaaacaagtagaacaaactcatggccaaatagaaaccaaaatttgttctatgtctgatgctttgaatggaaagatagctaagaagcaggacagaattagtgacctggcacagacaatttgctgtatgtctgatgaatctactgccacaggccaaaagctagagtctaggattggatatttagaagacaatttatatgccattcagaactatctaaggatgagaatattaaaggtttagaagcacatgtaaatgaagaaataagcaaacttaatgattctatgaaattcttagaatctcacatgattcatgagattcaatctttacatgagacaatggttgccaagctccaagccttggatgacacagaatcagattccttccaatccaatgcccctcctctaatcaaacatcaggaaaaccttcctaaggttgttatgcatacaccactggtgttcccagcaactatgacagaaaaaccgctatccaaaaagcacacaaatggtcatatggcatatcagtgggaacccatacaactgaaagacctcaagggaatcaaggagttggttgtctcatatggtattcatagcccttatgtcaaagaattattaaatttgtgggctacctttaatagggtaacacccatagattgggaatgcctaaatatcagctgcgtgcttgaaaattcgtctcagatacagtggagagctctatgcagggaggaagaatagctatcgggctgcaagagaggttatgaagctctccaagataagattcttggtgagggtatttatgctgacccacaggttcaggctggatatgatgaccatatattgtccttatgcaggacagctgtcttaaatgccttaaatgcctgggacaagatttgtgaaccaggagaaagagtggaaacagggactaagatagaacagggactgaccaaacagttcactgactttttacaaagactatccaggacagtagagttacaggtagcagatccagaacctagaaaaattatcatatactgtctagcttatgaaaatgcaaatccaatatgcaaaagaatacttttgcctttaaagatcagatcagcaccactagaagaatgggttttgcatacagctaatctcgactacaatgtccaagttacaggagcttgggtaggagaggcaatctcaaaaggtttaaaaagacaccaagagattaaatgttctaaaggtgatgatgcagaagcttgggaaagagaagcaacttccagaggtctataaaggcaccaagaggccagttgctatcactgtaatggaacaggaacttggaagagcaatccccagagggtcgagaaggcaccagaatcctagatgtttcaactgtggcaaaataggacatactagaagaaattgtaggcaaggaaattccaacaatgcctcatatagaaaacttccacattctggattatgtaggagatgtgggaagggtagacactggaccaatgaatgtagatcaaccagtgacatacaaggaaacccattacaattggaaaactccttgaggggcctctggaagtcccccacattgagaaaagtcactgtggaggaaaatatctcacaggacaaatagatagtacattgtctattgtaaagaatggtacctctctagatggtagcgtggctagtgaggaggaatcaaaagtgactggaggagacaaaaaacacatattttggcaaacttctataaatgatcaaaggactcagttgaaagtaagaataaataataaagttattaccagtttggtggacactggggtgggcatgactattataacccaaaagtcctggcctcagagatggctactaagagaggtgaatgtttaatttttagatattggaactctatctagagtatgacagagtgttaggttggttgtctgcattggactggaaggacagagaggtaggttaaaacaatatgtagcagacatagtaataaatccctgaggccatgatcttttacagaaatggaatacccagattaacaatcctccagtatcagatacaaatcatatacaacctctagatcatagacaaaatatagtaaggcactatagaaaacagataccaaccatccaggctgtacagaaacaaagtacaaatgataaaccttcagaggaaccaagatttctacccttaaagtggcttacagatgaacctgtctgggtaggacaatggcctatgacctctgagaagctagaggctttggaaaagttagtgcaggaacagatagatgctgggcatatagaagaatctaccagcccttggaattctcctgtatttgttatcaaagtcaggtaagtggaggatgctgacagacctgagagccatcaatttgtgttcactgtaccaactcttagtaattcgaagccagttaagagatttcagtggaaggttttgctacaaggaatgttaaatagtcctaccttgtgccagcactttgtacaaaaacctttggagataattcgtaagaaatttccacaatccatattttatcattatatggatgacattttactgccatcttctaagaaggaaacattagaatgaatgtttgagacagtgaaggaagttctacctcgttggggattacagattgctccagaaaagatacaaagaggagattctattaagtatttaggttacaagatagacttacaaaaaatcaggccacaaaaaagtacaaattagaagagatcgttatcaaactcttaatagtccccagaaactgctaggggaaatttctcaactacagacaataattggagtagaaggacatgacttaatacatttaaaaatggcccttaaagggaacaaggacttaaacagtccatgaatattatctgctgaagcggaaaaagaattacgatggttggaaagcacaatacaggatgcacatgtagatcgtgtggaccctaatttagattgtattcttgttattttaccatccagagaagagccttcagggattctgatgcagacggaagatactatattagaatggatatttctgccacataaacagaataaaaagctaaagacgtacatagaaaatatttctgacatgattctaaagggcaaattaagattcatcaactgactggaaaaggtccagcagaaattatagcacctttaaccaatgagaaaatttcctccttgaaaggacaatgaacactgccagatagcttttactgactttttggcaacaattagcaacaattatcccaaaactgacagaattaaattcataaaaaagacagtctagatccttccacataagaaaaactcctatttctggagtccttatcttctacgctgatatgtgaacaaatcaggtaaggcagtatataaatcaggagagataagtaaaatagttaaaagtccatataactctgtacataaggcagaattatatgaaattcttatggtacttatggattttacagagcctctcaatatagttactaattctcaatatgcagagagtcattttacacttgatgtgactgcagaattcgttcctgatgatacagaattaacttcactgtttatacaattacaagaaacaatcaggaacagaacctatcccatatatataacacacatcagatcccatacaggtctgccaggcccactagcagaagtcaatgatgagattgatcatttattaataggaagtgtgctagaagcctcagaatttcataagaagcatcatgtaaatagcaaaggttaaaaaagaatttctacatctcttgacaacatgccaaggagacagtaataaactgtcctacctgttccttctataatcaagttccattgccagcaggctgtaaccctaagggcattcggagaaatgaggttttgcagatggatgtttttcactttgcagagtttggaaatttgaaatatgtgcatcatactatagacacattttcagggttcaatgggctactgctcttagctatgaaaagactgattctgttataacacacctgttagaggtgatgactgttatgggtatacttgcacaaataaaaactgacaatgctccagcatatgtctccactaaattggaacagtttttcaaatattataaagcatgtaactggtataccacacaatcccacaagacaagcagtggtagagagatctaatcgaacacttaaagaaatgctccataaacaggctgggggaacgaaaacccccaaacacaggctacataatgctttattaacactaaattttcttaatgctaatgagaaaggacaaatagctgcagaaagacactggactatggaaaaaactgctgaactgaatcagccatatacttcaaagatgtattgacctctgtatggaaaccaggacatgtgttacctatgggaaggggtttcacctttgtttccacaggacaagaaacactttggataccatcaaagttgatcaagattagagtcaaaaaagaaaaacctctcgatgaggagaaatgacaggtaatctaccaaggcatatctcataaactgtatagaagcctcacaaatgaaagggaagtgttttgtttttatcttcacaggaaaactcatctccagaaagcaaaaacaacttcatggatacttaaagaggggatggtagctatccaaaaagaaccattgaacaaatggaatttgtcatatggtaaactctatatatgcctctaaatctatttctatttacttcctagtccctgttcaattaaaccaatgagttggatttggctttcctcctctaaaatccaagcatgttgttaaaataaaattcagagtttctttactatatcaagaagccaattgatgtaacacagaataagaaaaaaaatggggactgtcatttgtcttttcttggctctttctctcaaagtatacattccctcataattgttattttcccattgttgcctttcccggtatgcatacatataaaagtaaaagtttctctgctaacattcatgtttaagtttcccacagccaacgaagaactgcctaacagcaatccttgaactctccagaaagaaactgggccacacctcctcgagtcagtgggatccaacttgattcgtttgaactgacactccggccagagctacaggtactgacttcaattaacacaagaacttcaatcaagataaggacttcaactcagacctttaatcaagcatttcccaacaaacaggtactggattcaatccactcaagactttcactactctaacattttcttcctacaggaccccatcaggctatcgttgtcccatttcagcaggaagtaacttggagaatactatgctccctttccccactgttgtcactaaggataatgtaaacctagttaaggctattttcttattgtttaggggtgggtgttcaggccatctttttcagatggctttagggtttagttggaatagacatagttaggatgtgataatagcagattattatatcttcttgtaattcccctttattattgttaattatagataatttacactgttaagttttaatcctctttagagtaaaagggggaattttatgggaaatcctgtttagaggtaatgctgaccatgcccgcttggaaacaagcgggcatggtcagtgtgacctgggaaaggtttaaatagtttaggggcacgcatttggggctccttctctcacttcctgccacctggctgagtggacttgcatgagtactattacttaataaactactttttatcaatccagatctgactctacatttcattaggctttaacctctcatcaaagaaagttatctttacagaagatggagaacactacagaaaatcacagctagcctaaatgcagagaaaaactgaacattgggttcctagtccctgttgaacatcgacaacagaactctaagtctaagggaccgagagtgtggacagcttctaagagtcagagggtcagaaaattgctgtgagattgtgtcttctataaatgatgaggaagttttcacccataaagtctcaccaacatggcctcctaaacaaaacctgaaaatgtacaaaactaacatatattcgaagatggaatagggacatatcatggggctccacccctagacaaaaaaatctgggcaagtaagacatctgaaatgggagaaataatcttccccagggatgagcatcctaattggatacacaataccaattggtcagccccgaaatcatatacatacaggtaacaccaaaggataaatacttagccttgtacacatatatgtaacaataacaaataaaaaagccatgaatttgagaggcagcaagaacaggtttatggtagaggttggagggaagaaagggaattctagggcaaatgacgaaattgccttctaattaaaaaagtgttagattcctctgggaatctagcactttgatttttgactatagctagtgctcaacgaatgcttctctcttaaccatgcatttcagattctaattcatgaggtacttacaacaagaatggtaattgttcaccacatgagaatcaggacagaaaaatctagcccctagagaaactttccaggcatgtagtctgtaaaccatatcctgggaaacttctggaacagtttttcttcagtgagtcagaatcacctttaattatgttggatgactttttaactattccagtttcctttctagaaacatgaagagtcagactctagatggatggggcataggggaccaacacttatatacatggtgccaagcgattattaactaatgctggagcctacaaactcttctccttgcctctgttagcctatatataccttcagtccagacatggacacagttgttttcctattgtgttcacttctgtgtcctctgtaccagaataacatctggtacagaataaacatttattgactaaattaattaagttatatccatatagattatcatataaatctaatttccacctggaaagttcagcttgatgaaggtttctaatgctaagaaacaaaaccacccattgttataatcatcttctaaagtaaggaatacaagttaggtaattgaaagtcctcagagacatcagtttcttttatacacttatattgggtatagaatgtattataactatgtcctcaaagccaagatttcattgcattctagttactgattaggtataagcatcaccctgggttgagtccagtctagagatttgaatttaccaaataccaagtgccattcaaacttggtttctccttgaactactgtgattttggatcatcccttcaggactggaatctgatatgatggactcaaacaaaagtttgacaatgatatgacttgctatgtgtgggtatttgaattcacagcttggatctgggctaaacccttccacttggactctaatattcagttcatagattttgaatctcttttcagggaagagacctgggttttatgactcatgtgcccacttctacagcaactataactagattgagcatctgtacctgtaaatttctttactcagtcctatcgatacagttaggtagtctatatagttatggggaaaaatgcttttgctgaacaaatgttggctcctcatgtgggctacgaggtaactaaaagccggataaaatcttggaatctctgctttttccacgcctcctttactttggattagactcctgtttatctctgcataagaatgctattcttgtgtgtgtgtgtgtgtgtgtgtgtgtgtgtgtgtgtgggtgcgtgttagggggttggcacataacatggcatgcatgtgtggaggtcagatgacagacttgggtgctggtgctcaccttatatcttttttatccttttatttttgagtttataatataatctatcccccctttcctccctccaaattcttccaaatatccctccttgctctttttcaacttggttgcctcgtttttcatcaagtgttgtgattgcatataactgcacacacacacacacacacacacacacacacacacacacacacacagatagatatatagatattcctaaatacaactggctcaatctgtgtaatgttacttgtatgcaacttttcaggactggtcatttggtatcggataaccaattggtgtgatcttcccaggggcagactatttcttctactcttgcttgcccatagttctttgtgcagtattaaagccttctgggctttctctcattcactttggcaaatctttaagtgtcatccttgttcagctcattagacaatcacgttggtgagactttatgtgtctagcttctgacataggagacgcaatctcatagcagatttcctagttctctggctcttacactctttccgtttcctcttttgcaagcctctttcctcatgcaccctgaacgttaggtatgagagtgttttgtaactgtatccactagaactctgcattttgactggttgtggttttctgtaatctcaccttccatcttgagatagggtctctgttgttccaggttagctggtgcattctcctggctcagccttccattttgccatagaaacattgtgattactgaagcacactgccatgcctcgaattatatggggatctggactcatgtcctcatgctttttggcatgtgtgtttattgactaagatatctctctggccctgcaatcatctatagtctggtgatatttatcttgtatttcttttaaaagctgaagggacaaaggtaaaaatcattgtcctaaacatgtcaccaaggtttctaggtcagattgctccacaaatgtggagaattattttttccatgaatttattttttattagttcaaattagaaacaagcctgcttcacatgtcaatccctgctccctttccctcccatggagaattatttttgatggtgaggctgcactgtgaagcagaagtgatcattttatgggcacgagattgtccctgaaagtaatagggacttttgtgaagtccctttaagaaccacaactgagacaatgatcagctcgacactgactgcttactcatgtatgggtctcttccccctctaaacttttaaagctcatgacaataccctaacgaggaagttgggtaactgaactttttttatcttgtcctcttcttaatgtgtcacattcattaaatcttctttatttgcttttcaccattacttgtgtctttagttggcaaattgggatgggggcctgccatatccttgttgggactgagtgcaagattttatcttaaaagtctatcaacagcaccaatatcggatatggtagctcacacctataatttcagtacttggtgaagcccctgggtagaaaaggagatgctcccttaccctagttctttcctctcaatgtaaatgagagtctcttaaaaatataaatgaattaaagagataaactctgcttccatgacatcaggatgggatagaaggaagggttggagtgatgtaggctcactacggccttcttggagactgtcttcaagtgggctatacacagagcatatatgacccaggggtgcaaaccttgtcttagaggagatctgtgagaaagcaggagggattttcctattgaagatggaagggataggcttctatatgccaccctaaattttgcctctgggcttttttctttaaacttttctttattccctatatcattctttccttcttactatgtggctggctgggtggatgagtgcctggcccttggtgtcttaccctccttttccttttctctatcctcctccttctagttcttttctgcagcccagatttctcctcctatttattctttctttatcccagccctgcctatcctttctcctgcctagctattggctgttcagctctttagtagaccaatcagctgttttaacaaggcaggcaaagtaacacagctttacggagttacacaaatgcaacataaaaaatgcaacacatctttctaccactaaacaaatattcctacatcataaatgaatttaacatatcttaaaactaatattctaccacatatatgtgtgtgagtgtggtatacatgcctctagtgtatgagaccagggaaggacattaggggatcctactctattactttctgctttgtttccctgactcagggtctcttgttcaacctggggctagactgagagccaacaaggctcagaaatccttctgtctcttcccaaacccatagcatggccacacccaggtttttattttttattccttaacctgggtttaggaattggaactcagtccttatacttctgcagcaaacactcttatctactgagctatctccccagcgcataagctaccatttttacagtggatttaactcacagtaccttcagcttatggaatacaatatcgtggaaggtgtttggacatttcctgtttagcactacccagagtagctgcaattagaattactttatatttcctcctaagcccttggtgtattactcttacttgtgattcttttggcttctaggtttctgaaaagactaagccaaggatgaccttgaaccgcctctgcctgccaagtgctgggatgacaggtatgtgccaccctccctggctgatgttatttatgaagacttatctttactaaccagtgatgtcatcaggctgaactttcaagtgaatctcagatacccactcatttccttcagtagcacattgtgtctgaactttatccgagctctggaaataataatgctttgtattctgggaaataacttgttgtgctgtgatggctattcttgattttcaacttgactacatctagaattaactataaacccatgcagctgcgcacacctataagggatttttagttaattagatcatttgaggttggaaaaccaaaccttctgcttccaggaagatcagcctccagcagctcaggatttgagcaagagccagtggagtcagcggacaatcgctcaacttggcttttctatctgagggagtcaaacttaattctctggggctatcggaaaaagggaaaaggcacacacataatcttagggtctttctctgttctctctctgctctttattttcttacctctatctaggtgtttcccttctgcctctctcaatgttttccttctaactttccttctacatctttcctagtgtttttcttctctcgttccttctacatctttcctggtattttaattttcttaattttactttctctcttacagcttatatatcctagcaaaatctttcaatctaaaaattgcatgttacatttatttttcaagagcatgattacaacaaatggaagtcaaaatcagtatgcttcccatatctcttacatgattaaacattttacatattacaggtgaaaaacaagttgtttcaagaacccacatgtattcatatacaagcaacttgttacagattaacagagtgtaagcaagcaaggcatttttctcagccagttcttttactgacagcctgcattttgtggttacaaagaaaggaccaatcattttattatcttaaaaggtgatcttataaaaaaatcttaaaagaatgacaaatctaaacttttatatatgaaaactgtcagtcagttctacttttaagtccttggagaacataccactcatcaacaaatattttatatcagaaaactgagggcagaaatgggtacaagaagctagtcatcattttttttaaatcaccaatccatcctagcaagaaaggttcttcagccaacaatagccaggctgccattcatggttcctggttcctgacttcagcttgttcaactatgtgcctttaaattgttttccaagatttttacctcaaagccattaacaaaagcatcttcagttatttctaaagctttatttcagctttacaaatatacaccaaaacttgcaaacatatctcccaacattaagattaaaagaactagagctaactttgcttctggaactcaactgtttttcttaagcattaaccaaaaccacagtctataccacttctgaagagctagtttagctgtgtgacatttccttgttctactttttatcctttgtagcccccattttattaggggtgagtgacagcactttaaacagtgcagcttaagaagaaattgttgtagaatattagtttgagatgtgttacattcatttatgctgtgaaacgtttgtttaataattgcaaagatgtgttgcattcttttacattgcatttgtttaactttgtgaaactgtgtaactttgcctatctaaaacacctgattggtctaataaagagctgaacagccaatagcaaggcaggaaagagtttagttggggctggcatgtaaagagaataaataggaggagacatctgggaagagaaggttgaggaacaagaaaaggaggaaaacagggggcacccaactacacagcaagccacaaagtaagaaataaaaaaggtatacagaaatagagagtgataaaagcccagaggcaaaagatagatgggatcatttaaattaagaaaaaaactggctagaaacaagccaagctaagtccggacattcataagaataagactccatgtgattttatttgggagctgggtgacgggtcctccaaaaaccaaaaaagccaacgagtaaaaaacaacaggaaatcatcttcataataatccacagggggaaaaagatgcctattagaatgagatatttctaagagataatctcattacattaagggcagtggggatctctggactcccattcacaccatgccagataccagagaaaaatgacagcaacaaacatgtaaaggcacagcaataacaagagacattctgaggccaaagccatcagggccttgtctatctgagattcacccctcagcaccttgcattctagtggactggttacctgaattcaagtgccacctgctgctcctctgacatggctactgccacaaaccaaatgtgagccacactttctcatagcagcccatataaaggacacggaagaagaaatttgtgtaacaatataaacccagagacagatactgaagatcagaaaagcaaagcagctgaccactagctcttacctctaccaaactgaaatggcgatcctgtctccacaaatcctcatagacaatgctctccatgaatcctccgaggcaaatgctctgagtttctgtcttctcccacctaatattccttcctccacctagccttatcactcctgtctccacctccctagtgctaggattaaaagtatatgctactactgcctggcttctatggctacctagcatggctgctggaattaaaggtatgtgtcaccactgtcttgctctctggctgtggcgagctttgcattttgatctccagtggctttattaaatcataaaccatgtatcaccacccttttgggttttgcctgcttgccttcattctcactataaggttcataggtcgtgctactgaggcatttctttgctagtgtagagtctacttcccacatatattgaagagcagcaccatggactgatcaagaattggacttttgaactttgtcaggagacagttgtcttggactagcaggaccacagtctgtaagccactttaacaatccgccacacatgtgcgcgcgcgcgcgcgtgcgcgcgcgcgcgcacacacaccacacacacacacacacacacacacacacacacacacacacacacacacacacacacacacacacacacagagtttttttcatcctctcagctatgtttctcaagaactctgacaaacacatgtggagacttactacttcaaatataatatagaaggggtttgttatcctcactggactcttcttgtgactgaaagtccatggccaggccaagggtgggcgctgaagcttccatgcttagtctttctattagctagctgaatgtttgtcctcatgcaactagcgagacacagagataaacatttccttttaagccgattgagacttctgattgtaaaatcaatttaactgtaaactatttcatttgtaactagtttctacctatctccccataaaagtataagacacatctgccttgctgagatatgcccatcttcagacatctggctgttctcctgcccagagagacagaatggtttccccaaattacaacaggaaccctgtgctcagtctgtgttgatgctgccaccattcactcagatgcccagcgatgtttcctcaggaggaaatctctctagttctcaccattaaggatgtgtggtagacaatgggtttgtgtatgcacatattcagattttttttcccttttcacttgcaaggtttttaatgtcattaatgtgctccatgtgctgttcccctcacttgtcatgactggaaccttatacaccatgatgccagatatctattaagcgtaaatccacagaagcagtatcctgggaaaaaaaagtataattcattttgagcaaatcctgagtggaaactttgaaagaacatcaaagggcagcatcttaaaacatgctccctttcttcttccatctcttttatcgctcctgaattttccagttgacatctcttccctcccatgttctcaaggatgccacgtgtaaagccatgcatctccgctctccatctttatggctttggggaatatagaattaacgtgaacagggactataaaacaaaccacagtggtattgaggtttatatatgtgagaggataaagagaatagtgattaaagaaaaggagacgcaggcttgtattaaaagtaggaagtgtagctgtgtgtaacccagtatgtttatatggcactctatatatagaaaacaccagaaataaatgaaaggagaataataccctcaatgtattccttgaaaagcagcaggaccattttctaaaggaaattttaataaaaaatacaactttgggacaaggagttttaaatacctgtggacttgacagccaaagaagtagaaattcctgatgagtaagaggctatgcaattcatttttaaaattaaacaataaaacaaaaacaaattatcattgatttttcttatcattaaaacaacatgtatttatttggggaaaattaaaactataaatacatctatgtatataaatatacatacatattgcattaggtacttttctattactatgacaaaacatcatgtccaaggcaacttataaaaaatacactgaactggtcttacagttccagagggtaagacaccataatggcagcaggagcaactgagaactcatacctcacactgtaagcgagaggaagacagcatgatgagaatgacactgagtcttttgaaaccttaacaccccaccccctcagtgatatgcttacttcaacaaggccacaccttttaatcctttctaaacagttgtaccagctggggaccaatcattcaaaccggtgagcctttctcattcaaatgaccacacatatataaatgtatacacctataaaaggatgttaagtggaattgccatatattatgacagacaatacccaattggatagcatatgctcccaaatagaaacccccagtacaagaaaggggctattttttgagttgttggttgaaggaatcccatagatcctcatcccccacaaacactacaggctattgttgaagctattggttaccctctacagcctgctggtaggacactgttgctaaagagaccacatagctatgtcactgaacatgctgagctggtactcaactagaagcttcactcttattagctggcattcattgtgtttctaggtgctatatgcactattagagaagaaaaagtaattatcaatcctacccaactatgacctctttcttcatgctacaatagctattttgcctctaagctatgcctactggtgcaatagcatcataaatgttatgggagtaaccaaccactttttaacacatgctttaagccccactccatgagctggaatccatatctgagattgttaataaggtcaagatcttgagactagataggttgtgaaccctggaagaaaacatacgactatgattctgctcaattaagatagcaattcaatgactactaatgacattttttgccacaccctcgaatgagtacatcactcagtcctcattagagaagtttcctcttgaaataactaggaattaacacacagacccacaaatggacaatccacagagagcaagcgactttgagaccctcagcctgaaattagatgtctttaacacatttctcaaagttcagggatctagttgaatgaggagacagaaagatggtgagacagagatggtggatgacttcacagaaaccatactttctagacacagcaggactgttgcacatgtgaatccacagagagttgtgataactgccagaagatctgtgcaacctcacgccagacaaaatcgcagcacagagaaggggaagtggacacatcaacctgcccttatccaggaagctatttgcaactgatagctgctgggaggggggaatcattttttttaaggtgcagtgacatcaggtatagtaaccacactccaaatttggctccacactcaggagttcatcaatacaaatctgattccatctttttggtatatgctctttttgtcctttttgttgttgttgttttttgagacagggtttctctgtggctttggagcctgtcctgaaactagatcttgtagaccaggctggtcttgaactcacagagatactcctgcctctgcctcctgcgtttgctgggattaaaggtgtgtgccaccaccgtcctttttttgttttttgtttttttcttaaagagagacaaagaacttgaaattagataggtaggaagatggagaagactctgggatgtgttggggaaggtcaaagaatatgatcaaaatatactgtgtaaaattctcaaaaactaagtaaaaacataaaaaaatccacaccaaattgttattattttttttactattaaggcaacatatatttatttggagaaaactaaaaatatcaagtaatctcagctcattataatcaacttgattagcaatgctattgccattttcctgtatactcactggtttttaagttttccaatctcttgacttttattgtcatggaattttgttttttagttcatagaaagagcaagtttaatgactctatgatggcctatgtaccatcatgttaacctagcatctctaggttatctagatgttttccctcagatttttctgttacccatcacatctttgtcctcatttattgcacctgagtaagttctttctggctaccatggtctggacagtccaaatagtctacttgaattgcactgcacactgcttcacacatcggaaagtgaagtgctgggctacacatctggggtgcaaagctgcagggacaaaagacaggattggaacagccaaggggcttggtgagctctccatgatttcagaaggtgctggaactctgaatggagagattatttagttatctgcatttacctatgaattctatttagttaatatatgaagtaagcctgagccactaatgaaacggggggggggtgaaactgaggcttgggatgaaccatggaacgaatttaccctgttacactcagctttcatttgcccacatagctgagaataatactggtttcctaaggaaagaacagttctgtctgtagggagataaaagcattaatgaaagaagaaacaaggatttttctaatccccacccctcactgttgcctcaagcagctgggattgaagagtatgccctagccatgtcaagacgcaaggaactctcttgactttacaagtgctctgtgagatctactttatgttttaaactcttgacctgtgattgctatcacattagaactataccaattaccataactgtaattgcatttcttttactattatctagaatattgtgcacattaatagtggagcccccttttttatttctgttgaagagtaattacccctaaacaattattacattgtgggagtagatttttgtttaatttctgtgcataagaaatgtcagtatcagagtagcattcagaaattatctggggcagaaatacactgagtttcctctgaacaagattttttaagtgcaagagtgtctctgcattacagaaatgtgagagcctttccctttagggtgcatttcctgactgatgatcagtctactgacctggaagggcaagtgataagccagtttactcttctatgttttgtttcataaagctttatatagctcctatgctattgcattctgcctgtgggcaatagcaacttcaaataattattttaatatctgaaattgataagaggactctgaaaagaattgcagtattgctcttctcatatcgccacttaggaagtaatgactgtaatgagattgagctcatgtgaatttatcaagtttcctgcttcatcttccaagtgaaattcactttttgaacaatgtgcagccaaacatggcacactttgaacttttttatgtctttgatgttaatggatttgttttcattgtaactgtttaatgttgaaggccactataaaaagtcatgttttttgaagggtctagtttataagaagttctagtttagaagggtctggttttcgagttttcagtagtttccaagcccaatgcctgacttgttccttttccctcatatgcagagcattcttgataaaaatggaagtttctgaggtgaagagtctttttatcaattgcgttttgttctatgaaaaataatagcaaaaacatgacaagatagcattatgatagtcttgatttcttgtttgagttaccatgttcagaaacttaaaagttaagataacacagaatgttagctgatttagctgagtaactcagtggcatttggtgcattcaagatggtatgtagtcatcagctcaacatgataccaaaatatttagatatctccaagcaattgtatatgctaggtaactgtctatggatatacctcttctggacatttctttctaatcattcaggatttgtgttttctgtgtccaactgtttttcacataagaatattttcttttctgccttctcctgtcccatcctctcatgtttttcttcttccctttctcttcctgttttccagggggcagttcctaattgccggtaacatcagtggacccttgctcaagcaagatctgtcacatgtggatattatttcataatgaaaactggtgcagaggagccattattgagtagacaatcgttctgagaatgccaaagctagacaaaatgatgttacatatgaagccattagaacagttctgtcaggcatctgagacagagaatggacacaatgaatgctctccataacattacttctgatgttactctctataatgttacattactctctataacgttacttaaaatagaaaaacccaaaatcattcactaccatggtgctgattaatagttatgatacaccattaaatgcaaaattattcaacgataataaatgatgttgatgaatatttgaatactgtaaggcctagagatttttcagcatatttcccaagccactaacccagcccaagctctactttttaaaatttctttggctcactcattatttgtatgtgtggtaactttagctttaaataaacaatgtgattaagatgtaaactttttttgttttcctggggataattattcattctctttgtttctgtctccctcagctgccttccattcttccatttcttggttttcatttgcttctatttctttgggttttttttttttttgaagccatgagttgcttaccttccttatcctccaatgccattgtaaatggctcaattcagttagcacacaagcttatcagatcagatttcaggtgttttatagtagacactaacccaaaaggtccttctcttttagctcttagagagaactggctgcttgttttgagtcattcattgttatctttataccttgcttcaccatctttatcctgtcttggatctttcatttctcttaccatttgtttttccttctcttggtagatgagaattctttttttcttctttatttatttttctctcatatattacattctgacggcagctccttccctgctctagatccctctcctccatctctcctctcctccagatcgactcctcctcctttcccttcagaaaagggcaggcctcccagggatatttaccaaacataggatatcaaattataataatactaggtataccctctcataaggctggattaggcaacccagacagaggaaaagaatcccaaaagcaggtaaaagagttagatagcccccattcccactgttaggagtcctggaagaacaccatgctatgcaaccataacctatatgcagaggatcacagacccatacaggctccgtgattgttggttcagtctcggtgagcccctctgaactctggttagttgattccatgggccgttttcttgtgttctcctgacccctctggcttctacaaactttcctcaaccccttccaagtattccctgagctctgactaatgtttggttgtgtgtctgctcccatcagttgcaggctgaagcttctctgatgattatgctgggctctgctctataagtatagcagaatatcattaggaatcatttttctctctttctcttcctctttctttctttctttctttctttctttctttctttctttctttctttctttctttctttctttctttctttcttttccagtcatgtttggttctatcctaggtctctaagctatctagactctggttcctggccctccaggcagtgtcatgtgtgagttccctcatgtggcatgcatcttaagttggaccactcccaaaagttctgtgccacctttaaccccacatttttcaggcaggaaaaattgtaagttgcaggttttgtggctgggttgatgtcccaaaccctctgctggaagccttgtctggttacagaagatggctggtttaagctccatatcccctattgctatgagttttagctagagtactcttgtggattcctgggagtttccattgtactaggtttctaacctatcctggaaatgcccctccccattctagtcatctttcccagtaatctcctccaaacctccctacctgattcttcctgtaccaatccccacctgcccaagtctactaaagaaatctattctatttccccttcccagggagatccattctctcccccttccctaccctcccgtgggtctgtgggttatagcatgattaccctttactccatttactagtgactatacaccatgttcatctttctgggtctggattacctcactcacgaagagcttttctagttcatccatctgcctgcatttatttatttatttatttaaattctttaattaccactcatatttacatatccatccccccattccctcgccctcccatgttccccccaatcccccaacccattccccaactcctcaccagggacagtgaggccctccaccagggaccttcaaagtctgtcatatcgtttgggggagggcctaggccctccttgctgtatctgggctgcaacagtatccctccataggcaatgggttcccaaagtccatttgtgctctagggttgaagactggctccattgttagatgtcccatagacttccctggcctcctacctggcacctacattcagagggcttggttcagtccagtgctgttaccgaagctttatgactggggtctccatgctctcactaggtcaggtccattgtttctccaagtctctccagcccccgtcttttgcctgaattattattatttgtttttttctagacagggtttctcagtagctatggaaccagtcctggaacttgctctgtagaccaggctgacactgaactcacagagctccacctgttgtaacacagatactaaaagacccagagacagatattggagttcaagctgaagatcagaaaagcaaagcagctcaaccagtagttcttacctccgattcagattgacgtgggtgatcctgtctccatgaattctcagagtgctgtgcagatggaactgctctccactaagcctcagactgcaatcccttgagttcctgtcttgtcccgcctcatattcttctctccacccagtcatatcactcctgtctccacctccctagtgctgggactaaaggggtgtgatcccaagtgctgagatcacctttgaatgagctgtttctcttttagactggatcaatttcgggtggccttgaactaacagagatctgtctgcctctgtctcccgagttttgggattaaaggtgtataccaccaccacctggcctctatggctgtggctagctttgtgttttgatctccagtggctttatcaaatcataaataatatatcaccagtctgcctctgcctgggattaaaggcatgtgcgactactgcccagtgatttatttatttgtttaacagcggagtaatacttgattgtgtaaatgtaccacattttctttatccattttttggttgagggacatttaggtcatttccagtgcctggctattctgaacaaagctactatgaacataattgagcaagtgtccttgtggtaggatggagtgtcttttgggtatgtgcccgggagtggtatagctgggtcttgaggtagattgattcccaattttctgacagactgccatattgatttccaaagtggctgtacaagtttgtactcccactagcaatggaggagtgttcacctttctccacatcttcactagcatgaactgccacttgttttttatctttgcctttctggtaggtgtaagctggaatctcagagttgttttgattgcatttccctgatggctaaagatgttgaaaatttctctaagtgtatcttggtcatttgagattcctctgatgagaattctctgtttagatctgtattccactttttaattggattattttgtttggtgatgtctagtttctcaagttctttatatactttagatattagccctttgtcaaatgtagagttggtgaaaatcttttcccattctgtaggttgacatttgccttattgactgtttgatttttcttatagaagcttttcagcttcatgaggtcccatttattaattgctgatcttagtgctgacactattggtgttatgttcaggaagttatctcctgttccaatgtgttcaaggctatttcccactttctcttctatcagatgtaggagaaactgcagccagcctacccaaactgcggttgccctgtccccggtgcccaggccagcctgcatgagcatgtgtgtcaggcacttcctccctgagccaactctgcctctatgcccagagactgctgatggagaaatacttgtcccagagacaccaatgaggaaagaacgatgcagcagagtcagctgcctgagccaataggaccttgggaaggggtataaaggcaggtctaacttctttaataaatgagtctgctgcacactctgctactcactgactcccagtgtctgagttgttggtgttacatcttctcacctcctctcctaaggggtgtttgagcaaggtaaccagcaacaatcaggtatggtgtatctggttttatgttgatgtctttgatctacttgcactagagttttgtgcaggatgatagatagatatggatctatttgcatttttctacgtgtcagcatccaattatgccagtaccatttgtttgttcaagatgctttctcttttccattgtatattttggcttctttattaaaattcaggtgtccataggtgtgtggatttatgtctgggtcttcaattcagttctgttgacctacctgtctgtttttatgttagtatcatgtgatttttgatactatagctctgtagtaaagcttgagatcagggatggagatagctctgacagttcttttattttacaggattgttttagatatactggggtttctgtttttccttatgaagttgagtactattctttcaaggtctgtaaagaattgtgttgggattttaatgggggttgcattgaatctgtagattgcttttggtaaaatggccatttttactatgttcgtcccactgattcatgagcatgggagatctatcttctgatattttctttgaggttcttgtcatacaagtctttaactagctttgttagagttaccccaagatcttttatattatttgtggctattgtataggatcctgtttccctgatttccttatcagtttgtttgttatttgtatattgaatgaccttttttaaaagttaattttgtattgagccacttcactgaagttgtttatcagctgtagaagttttctggtagaatatttggggttgcttatgtatactatcatatcatctgtgaatagagatactttgacttcttactttccaatttgtatcctcttgatcttctttagttgtcttgttgatctagccagaactttacatactatatcgaatacctctggagagagtggacaaccttttcttgtccctgattttagtggaattgctttgagtttctttccatgtatcttatgctggctattggcttgctgcaaattgcctctattatgtttaggtatatcccttgcatccctgatatctccaagacttttatcattttctcaaaggctttttcagcatcaaatgagattgtcatattttttctttcagtttgtttatatggtgtattatattaacaaatttcataagttgaaccatcatctgtatctctgggatgatgcctacttaatcatggtggatgatctttttgatgttttcctggattcagtttgtgagtattttattgaatatttttcatcaatgtttatgagggaaatttgtctataattctctttctttgttgaacctttgtgtggtttgggtattaggtaactgtggcctcataaaatgaatttgacaataggaagttttgctgggcctggtaatctgggctagcatctgtgagatcatagagtctgcagggcatctttccaggaccttctgctttcagagtctcactgagaagttgggtgtaattctaacgcctgcctttatatgttacttagtctttttcctttgcagcttttaatattctttctttattctgtatatttaatgtttgattattttgtagtgagagtgactttcttttctggtccaatctatttggtgttctgtaagcttcttgtacctttataggcatgtccttctttaggttaggaaaattttcttctataattttgttaagaatatttcctgagcctttgaggagggattcttctcctttttctattcttattcctaggtttggtcttttcatggtgacctgatttcctggatgttttgtgtcagggatttttttaggtttaacattttctttgacccatctatcaaatcctcaattcctgagattttctcttccatctcttgtattttctcggagatacctgcctctgtagttcctattcacttacctagattttctatttccagagttccctcagtttgtgttttcatcattggttctattttaattttcatgtcttgaacacttttattcatttcattcaactgtttgtgtcttcttggttttctttaagggatttattcatttcctccatttttgtttgtcttttcctttatttatttaagggattacattcattttctccctaaggacctctatcatctttacaaaggtgtttttaatgtcattttctggtgcttcagttgtgttggaatatttagagtttgctatagtaagatggctcagtgctggtggtgacatattgccctgactgttgttgattgtgttcttatactggcatctaggcatcttggtttgggctgattacaggtctaggtgccagttttcggggctgtctttgtgataggtgttttggtccttgttttctgtttcccctctgatcttctggctgtagtggcttatggtagagtacagggtctctgaccaagttggtactagatttctgattgttggggtggcctctcgtcaagcacaggctttctgcctgagttgggaactggagttctagtggctgttgtggccttgagtgtagctgggggtcctctctgattccaggtgccagtgtggcctctggttgagcaggggccttctacctgaggtatgggccaggatagggtgatgaggagagaaggggttgttggggataggctgggtgggctctggtgagtgttggtggtccacgagccttatctggggatctgggtgatgccatagcctcttctggatcagggggcttcttcaggaagtctttttttaaaatttatttaacctttattttatgtgcagtagagtgaagtgttagattccctacaacaagagctacagacagttgtaagctgccatatgtgtgctgggaattgaacccgggtcctctagaagaacagtcagtactcttaactgctgagccatctctccagcccccttcaggaagtcttgatgagaattctcttcatggagcatatccttctgtagttttcatagaaaatgttcaagaaaagaaacagttttaaaatacacatgcctcacattttaaagtctgtcttcgcaaccaacagcttgattgggtcctggatcttaggtagaaatgtttcttctctttagaatcagtctggtcctcagtacccagcgttcctgtcatctgttagtctggtaacttagtagatttgtttaaaaatgaactttcacttgaaaatcttacatttttttctttaatttaaactgtatgactattacggaaacttgtagtgatgttcttatttgctcatttttattcagttgtcccctctttttgactttactttctaagagagttacttgactttattttcctactattcttttctcaaatttctgtgttatgtattgtatttttaaaatccccaatgctttttgttttccctctgatgtgtagttatttttactttaaccccctttctgtattttctaaattacttgttttcttcaagttctctatgtgtttgtcctttgcctgttgccttggagacactgaatttgtgtctgatgatttgtagccatcgctgtctgttcacacttaacaagggtgcctgagagcttatgaaaagccactgtctggtgatgcagctcactgaaaggcctcagaagacagttcaggttggcaactcccacattctcatctcacaatccttttgtttttggagtggttcaattttggaaagatactttattccactgcttgaggagtaagacttgaactgatgggattctagaggtggtctgaaagagaaggctcagaagtcccatattaagtatgtagaccttcagatgagctcttggttttggttgaatgtttgttttcagtcttgtgtacaaacttctgaagtcagcttaatcatacctttgttcctgtacttcttagcagtcatatgaaaatcacaggatatgactgtaccgttaaatgtttattccacatgctctataccagagtctgttaggcacacagataagaaaggtctggtctctgtttttgcatttgtgaaactggaaatcacaaaagtaacatcttttactgtgctaagaccccccacaggaaagtggtagaaaaaagtagaaggaaagaaagtgtcatttaaatggctatatgaagagtgagcagcagataagcaggcatggaaagatgggaaaaaacattccaggcaaaggccagggtaagactctaaaacatacagtaaggctgaagtgtagggagcacagaaggtgaggttaaggctgtggtctggtcagatcacagttctgcaaggaatttccttctaagcttgtttgtctttctgggtccaggaaagtaaaatgcaacctcacagggggaggagccatagagaggggaatagcaaggtacaagtgatctaaaggggaaaagaaccccagggttttaattagggagggtggagagagataaatatagatgaaaaggagggaggagggtaaagtaacagtaaggatgactgagaaagtgataagcatcctactattatgtatctagatgtaagtctgtgtatacatatatagtttaagtgatattttccatctgggttggcaatgatgattttctaatgaaaggcccaacctcagtcctgagaggccccattttgagttgttggtcagggtttaccaagaatctcacaaaacattatagaatactgctgttgcctttggttgcttcacagaggtggaagacaagctccttttgctaaagataccatgcacttcagacacatgatccaaggggactgatctggatctgaccagaaaacctccactctgaggactactatcagaaggcacatgcaagcctacagaaggagggaaacaaccaaccacctgcccagctatgatgtccatgaaccataacaatgaaaagcatggaatgatatccctaaggatacaataatggcacacataccttggtggtaacccacaggctctctaactggattgaagacatactcaacaagagaaaaatcatgcctggtattggaaacctagccaactacctgaggctagtgaagccagggatcttggaggggaacctataacctctatttcactaaaccaggatagttcctaactacattctaaatatttatccctatacccatggagaagttctcatcactcatcaaggaaccttctctttacaacaggcaaagagcatcatagaaagccatatgcaattaaattgcagaggacaagagactgcatagtgcccagtctcagctgatacatatatagcccagatcctgccccaaaggctcagggatcattgcagagcagtgggtagaatgattgtaagatccagaggaacagaaagttttctgtgagattgtgggtcctagaaatgtcagagtggctacactcatgagctctcagcttagtcatgcttagtcttgtttatcgtggctgcctaaatagcacctgaacaatgacaacaccaatggacatgctgacacagaagggggaaagctcattgagctttaatcctgaggaaaacaaaagccataagcaactagggaatgctgaaagagggagaactggtcttcccagggaagtgctctctgtttggtttttcaatatcaaggggtcaaccctgagatcctatgaatatcacaggtaacactgtactgactgagcagtttatttctaggaatatgtgtatgtattaaagtgaaacaggccaagagagaaaacagatacatggatggtgctcagggaggacagcaaggggtggaaatcgtgtgattatactttaaaaaatataaaattattataaaaatgattaaaatagaaaaattaattagatgttaagtaggggttaacaaggagcaaagttaagttaagactgtagcacagatgtctatcagggattgatgttagttattgccaatgctcagagtctttggctcacttagcacatcaaagaatagatgtgcacatggaacccaggcctatggaatgccagtggcctgtgtgtgaattctggctttgattgttctctgttatttactgccagtctcaacttaacatttctgtgtcactgttttcttatctgtaagatttaagatatggaaacaatagccttgtctccaagttttaaatttaatatgtcatttaaacaaaaattacttcaaagacagttgggaacataggacatgctcacagctcagtattacttgctactgttactgctgttttggggctttcctgaggtccacaggaacctggttttcacataacctgccatttatttgaaaatgtgtcttccataagagtagcatacctgtgtctagagaggacgaactgagtttgaatgggaagtactgttgtgtagctgggggtgtcctttattgatagagcacttgtttagcatatgtcaggccccaggttcaattcctaccaccaaaaataattaagcaaaatttagaagtcttggctttgtggttcaggtcagaatggcagcttcctggtctgtggtttgggagagctcttcctgtgtgtcaccatttccagtgttcctttcctacacattctttcccagtgtcctgtactaacatgcagaaatgggtctccttcgtaacgtgggggagtttcagccctgcaagctagtgttttaggtgaacttatttcaagttgaatatacttgtgttttctggtctgaatggcacacctggttttgaaggcccagcaaaacagatgtgaagaaccatggttcatcaataaagacttgttttctctcactacaaacagaatcctatcaccctgccccctttgtttttcaaaaaaggtttttactttatttcacagaacagctccctcttatttcctatgttctccttagattctgcctaattggatgattccacttccccttctgataaaaatctgacatgcagaattggaaacaggaacagtgattgtttccttattaatttttgctattttttaagtcttgtgttaattggtagcatcttcacaaggcccgcttccttcctatgtgttagattatagcaacttggtgtctgggatctcaaatgtgacccatctgtgggagaattcaatcacagcaggacataatttaaacctttgaaaaggaataattgtgtcttatgagagaaaggagaccaagggaaaaaggtagagaaatagtgtcttactaagtgttcttccttaaactgctgtgtcccttttgtatctaagtgggaggacaagaggtgcccaatgcttccttatctctccatcatattcaaatatagcacagtcaagtataacacaatctaacccatgcttttctgtgacccagcagggatggtgtctaagtagagatggggagatgaggagtctcattatcaaagcttaattgacccagagtcaggcagcatagcgagggctgggcttgaacctggtcttttgacagtcaaaataatccaactgtgggttattaagaaggagctaaactctggttgctaattatcttctccttagcttacattttaatgatgtccatatactggtattaaagataaataaggaatgttaacggttatctcaagtccagaggacctggttgggtgtgtgccattctaaaagagtcacaactagtggggtgaacattggtgccagggagtttgtgcattgttccctgggctctagaaagtttgtgttggtatcagtgggctccagggagtttgtgcctgatacattgggctctagagagctggtgctggcatcagtagactccagggagtttgcatttatccgtggtacactgcactccagggaatgagttaaaatgatcactcagtcactccatgactacatatactgctttgcactttctatgtgtgacagaccaaacttcccagaccacgttctgactgagttttagttgcactgactagtgatgctattctattagatttgaatatgatagagagtagggatgcactggggtacatttgtctattaattatccgggttaaaatgccattttaatgttaatagataattgtactttagagaggaaataagtcttgggaaaaattgaggtccatattggtgaagtgacatgactgaggttgctcacaagttagaggcaaggcagagcctggaatccaggattatttctcctccttttttttttttcaatgatgtgactgttaaggactagctctcaattctaagaagtatagtatgagtagaagggaatttaaaggtgctgatgccagagttccacccttgagaattttgacttaattggtgtgcagtatggactaggggtcaggagtgtaaaacttcacccaggcaatgctaagaggaagcaaagcttgatatcacagggcattaattttctacttgggctcaaattaaaaccactatgagaacctttaaaagtgtgtatgccggtagggagtaatcctctttagaggtactgctgaccacgcctgcttggggctggctaggtaccactgaccacaccagcttgggcattgtcagagcgacatagcaagagtttaagtatcagagagacatgctcacggccctcttttttctctctcctacctggctgagtgggagagcaggcatccagtgtaaacctggtcactggctctgtttcggaagtattttcttaataaactatctgttatcagtcttgttctgactccacattgtgtttggctttatatgcctcttaagcttcaccataacacaaatcatatgtctagggaggaaattaaggaacaatgaaggagaaagtcccctttgttggaactcatgtccctcatctttcatccatggtttttcattctcccaagctgtacacaatccttgacactggaactacaagagctactgtagattcttaattaaagaccggtacttagtttcagctacaaattatcttcttcctggatccctgtaggagatgttattactcatcctgggctttaaaaactaatgagaatggaagatgatgacagcctctcaagtatagagggtcctggacactactgtgtctattgtcataagatcactgtcttctacagtttaactatgccattgatattggttgattttggggtttagtgggcaccctttaggacttgcaggtttatgtgtcctgtaacaaagaactgagtggggacatgaggtcacagcagaagcaaagcaagttaaggaataatgcacttctgcagacagaggaatagccagagcagagacaaagtttacaagctagataaggttggaggtcctctccaaagttaaagtgcttgctacacaagcatgaggactgtagtcgagagcctaagaaacccacataaatgccaggtgggtgtgacatctcatctgtaattttgcttggaagacagagaaagggaatgaatcacccaaacaagctggctaatatgactagttttgattgatggacattgcttcgatgactaagatggaaagccagtctaggacaatctccaaatcaactttgggcctctacttctcacaccacaatggaatgaacaacagctcagtggctgatatacaaagaatgggagctcttatgttacacagcatgggttgggggggcatttgcactgcacccattgactccacatgctctctgtgacgtgcagttcacgatgagctttagatcacctttggatagtctcgagtgcctgtttcagtggtcccagccataaattcctgtgtccttctatcttccctcaataatgtagtaagaaaaatctccatactccccagtcctggatagggattaagattctgttcttgaaaaagttccctctctcagacattgtgtgatagcagcatgaatggaaaatgatgttgtccatgtcaattcaactagaataacttggggacccttccaacaattgggcctcatccctcagctgttctcaatttatgtgtcagatttaaggcttttgttaccacagaacacaaggtccgagttgttcatagtgttaaaacatttagaaaaggactaagaaggaaactgggggacaattgagcttgagaggaaaaaaaaaaaaacccaacagaacaggtgagctggtgatctcagtagctcccaagcagatggcaaagagatagtcatgtctgttgagttagaagtcaagaaaacaggtgggcttcacgatgacagtctgtgagtacttccgggagtggctctttagattgagtagtgttcagtgtcagggtaagcggctttaggagtttgaccaacgtgtgagaaggggatctagaagaaggaaaatgaatggtcattattttctgagtttaaacttacaaaagcaggcaggcctggctgtgagaatttgtaagaaactacactgagggaagagcctctgggagaacggaagcacatatctcattaaggggctagttattctcgtcttcttaacatgtattcagttgcacaatgtttcttgatgctgtaagacccccgaagaggcactttcgtagagggagacccacacacccaggaatcagcgaggccacgaactggatgcaaaaaacaagaggctttattggagactcgggtacccggggcgacttagcctctgtgtggctaagcgcgccgagccaagggaaaggggtccttatatagggaaaaaggcgcaagctaggagcagggattctattggataattctaatgaggcattgtacagagctattcccattggtcaatgtatatgaggcgctatacagggttattcaaatgaggcaaagtacagagttattcaaatgaggtgaaacacagagtctttcaaatgaggcgaaatacagaatcatttctattggatggttcaaataagacacagagccattccagatcagcatattctcaaggtctggtgtctggtgtctggtacagcagactcaattccccccccccttcctgatggctgaccttgggggcggagaccttgggacggagtgtttctcttcgggcgggggctcaggggcagggcttcaggccggctcacttggtgttcgttctcgtgccggcccacctggtgctcgccctcgtgccggcccacccggtgctcgttctcgggcctgcccacctggtgctcgttgctcggccccagccccgaggcgcggtgccaggcggggcgggccgggggcgcgagccctgccggggtgaaggcttgggaggctctggcagcttcggggcagggggctcaggggcatttcgagcgggtctttcaatgcttctgaactaatgtcttctggagaggtattttcctgtccaggtgactgaaaaatctttttgatgtgactcttacaatcttttggacagtttagaaagctctgtttctacccaggacaagaggaggactcggattccattgtcttgagaaaaaaatcatgtaatagagtagattaaaagaattgaagaaaaatacatctgtcagataggcattctttaacaggattaaactgcctttcctgaatgggcttcagcaaaaccctgctatctccactttccccactactgtgttgtatcatccatctgagggaggggcatgtggaatactttatcccccttaaaattatattgtcagagataggatacttggggttcaaagctgattacaagggaggggccactagcaggcctctgagtgtgctgaaatctccccagctccccagcacagagttttaaaaagttctccaggtgcagacaggagttagaaggacattaaggtcttctaggtactaaccacctcagcttcccactgaggcggttgactgagtatgccctggttggcttgctgaacatggaggtgcctttgcctggtaggtgtgagcctctgattagagagaagttattcagagttccatcagcaggtggccatagcgtcattctcattgggttcaggacttaagtttggtatatgttctctttgctttctttccaatctccaaatggaggaaaacaaagttggagacaatggcaagtcttgttctgaggagtccatcaatatctggggcaggagctgtgatgaaagtagcagtgtcctcactggcttcctggatttttgaccatgatgaactttagtcttcaatataaatgatggtgttacatgtaggtaagaaaccaaatctctgtcattagaggaaacctggaggggctggcagcagtaacaaggagggcctttagggacagcctgctctgtgtttgatcgttcctctttgttctcccagtctactgcttttccatctttcgtaacagtaagactgatacacagattagttttgatcttcctagaactctgcaaaatgggaaactgacttctagattgtcagaatttcactggggagccaggctggtggtacttgtgtggaatttcagcactgaggtagctcagacagactgatctgagtttggggtcagctatacttgcatatagaatccttgtcttggaaaaaaaaaaaagcaagcaagcaaacaccacaataaagttatcacgggaagaattgagcagagcatggaaagaccccctcagaagtttccttgtcttgctttcttctgagttttacagttttgcagaaaatacagtttgagaggccagcctgatctcagttatctaattcttcagctcccagtgcagattatcccttttccatgtagcccaactctccagttaagctaagcactgttttctcccacctctgctccactgggtggtaggtggtttgttgacttctttgaggtgcctgggtagtaggtctttctctttcttgagttttcttaaacatgagcctatttactcgttcatttgatctgagaccagcattgtactactgtgttatggtcagaagctgggatctggaatgttctacaatagatctgagatccagcattgtactactgtgttatggtcagaagctgggatctggaatgttctacaaaggcccaggtgttaagggcttagtcctcagtttgactttgttgagaagtggtggagctgtcaggaggtggaccttagtggaagctaggtcattgggaatacacattcccttgaagaggatattggggcatctcccccagtccttcagttcttggagactttgaataggcccgatcctcctcacatttctgtcacagtatattgtactgtcctcagctaaatcaataaggccaagcgatcatggacagaaaacgtgagctaaaataatccttttcggtcactgattgtggaggcaatgtgtaaacggagtccttttgttccacttattgctcactagctcctacttttaaattaacccatttctattaatccatgtattgctgcatggcttgtgactttacctgtggtctagcacattttgttgctctggggagtggctggcatctgcccctgattctgcctttcttctctctgtatctctgcctggatttcctacctggctcgatcgtgcttggttatagacctaatcagctgttttattaactattgggaataaagcatatccacagcatacagagggcctatctcacagcagcattgtatccctgtaatggaaagtgactgacacaatgtccttagtcacagctcagagaattataaaagggaaacactattggaaacaaaagttgtcttatttatttatttgctctcatcttctttcatttcagttctaggaatggaactcaagatcttagcactctactctaagcatatctcagcgcttggttttttgaaagctatcaggctccacctccacaatgttgggattatgggccttatgacttctgccatgttatttctcctctgcaaattattttctcctctggcttttcccactgaagttaaaatgaaaagaatatcgaggaaggcagcaatgcagaggagggactcatggcaatctattcttctgtgtttcacaactctagttgatcagcagaagtgaagagatgaggggaaaatggaaaatgatagagccacactctatggcttcccggacctccatgactctgacctgaagttgttgagaccaatgccttaggttatatcagacttgtggaagaactagacccatgggtcctgtggaggtaggtccgaggcataaaactccctatgttatggacatagatgaagagatggcctcccttctcttggtgcctggcacttggcagaggcgaagtaaatatttgctagacggacttgtctggtgtaagctcaggtgtcagttcacagagacttcctggagtttttaatgtgtttcttggcttcatttctgctgcttccctaccatgacaagagataccattaagttgaggccatttgttagtcattgcaagaacagttttattgggatgactattaccatgtatttaacttctcagatccctgtagcattttactgctgattattgttctactaatccattcagtggtgatggaggtgcattcggttttagcaaaggccaatctattcagctagcggcatgcccaatgatctcagctaaaagtcccctcagagaccctcccagattgtatcaggacctttaattatgtgcggctaatagagatcgcacaattttcctttgacattttcactcgagaagtattatagacatctgtgattaccattgtgcagaaaacttacccatgcagctttaattaagacagctttcaagggatcagcatctaggtcccttgaaattactgagttctttaggagagaaagaaatgttgactgacaggtttctaggacttttgtgtttacacagatacccatcagaaaccatgcatttaaacactcttctttttgttttgatctccttgaaaaagcactctaagttcttctgatataaaatacatctacataaagaaggaagataaatatctatcagaaacaaataaaatacagttgtaagccagagttcgagttgttgtaaagggttccacctgccactccatgaaattagaatttcctcatctatatgttgacctagtgccatgttttcaatctttagcaacaacatgagtgctccttttggagcttgaaagcttatattgaagacaaatatatgaagtacagagatgacagctcttttacttgagtccagagtggttttttcatatttcctagtagttctcatggcccctcgtcctttcaaagcagaaggatatttctggaacttgtggtctctgcatgctttggaaactgttgcttaattcagtaaaatatagtgacaagtctctagtgtgaaaatgtatactttttctttgacaaaaggataattggataaggcttcagttacccccttctgtctcctgaatgcctgacattcgacagcaacggcaatgttaaatatcttaaggcatccctttgtttagttttagttttgctgctaagggagatcctcagaaaatgtgttaccagtgcttgtaaaatacctggagacaacaaggaagacctataaatgtgggtatcagtactcacaactagcccaatgtgcaagaacagttcaatacatccaaaacataaggcattcttcagcaataaccttatcacaacactttttaaataattttttacaaggtattttagaagaaaggattgattctaacctctaaccttaagtatttcatccatgggtctcattcaataagaaaagtgaaggcttaaattaagaataatatataaaacttctgatgtttagatttgaggcatttcatacaactttttaaaatttagataacattttttcatttattttacatgcagactacactctccccaccatccactcctcctctattttcactcagaaaggggtaggcctcccatgggcttgagcaaagcatagcacattagaaacgtaatctcgtatgtatcacaactcggtagctcaaccacactttgagaacctgtagagggaaaatgccttaacataaatgagttgatctgacatcaaatcccagagatactaaattatttgctcaggttccttacttgtaacatgaggatggtgaacttgatgatctaagatgccttttggttggaggcttccacaagcactcatggtctatgctactgtggatgccctgctttctgacacacaggggtgaagtcaacaattccgggcacccagcctgtgatctgtgtgcaccctctccacttccatcactagaatctttctagacatgccagacaaaatagtgctttcaagttctttcctcatgtgaagtcttgttcaaaatcaattttctgtgtctggttgaggctcctggtagatgacttacttgtattttagtcatggtaaccagcaactgtactttgagagatagcccatagttggaatttgtacttcacaattgcttattgactttttccacttgtatatccaaaaataaacattatggtgaaaatgaattgcctttggcagttttaaggatgataattaactttttaaagcagcttacaatgtagtggtttcatctcacatctaaatcatctttttatggttttatatatttacattatttcacataaaaattaaataagaaacccaattgtgtgtgttttgatttttgtaaattaacataaaatactctgtgtatgtgtgctatgaggaggtcacaggatagcttgtaggagtcagttctccccttcagtctcttgggtatggggattggggatcaaacaaactcacgttgttgggaagcaactttaccagctgagccatctcactagccagccctcttaattagatcctaacaagtcattatgaagataccctgatatgcgtgccctttttcatatcggtataaatgtaaacttcaaataaaacccagagcatagctgtatatcaggtgctttatattctgaaaacctgagatacactagttactcatataaaatattagtaacactagtgcttagatgttaaaatcactgatatttcttctttattcacagcctttgctgttgttgttaatgtgaagttcattatatataaaagcaattaagacttcttgatttttattgtaaatattttataaattttttcacttgcatcttggctttgtgtattttggctttcctaattacaaatgtttgaaatatgtgtttttttcttttttagcttcttagtatcttatagtatctggacttaatggcatgtggttttgaaatcttttatgatgtgtgagtaggtgagatgcctcagaggctaaaggtacatgtctgaaaccctggcaacctgcatccaatccctccaacccatatgatccaaggagaggactcaccctgcatattttcctcaaaaatgccatgctctcctttaacgataaatctttctgccaagccacctgagccctgccgccatgtgggcgctttccgcaaagctgcctgaattctgcctgccgccatgttaagattccaagtaacacacagagacttatattagtttaaaatgctgctagccaattgactaagatttttatatgctagctcagacttaattatcataaatctatatattttataagacttatcttatggaggatgccttctgctggcatcctcttccggggatcacatggcagctccatagagaagagagcaggaggaagaggaggagcaagagcaagaggacgatttccttcttgtccctgcttatatatgagtctgcctgctatgtcacttcctgcttggatcacaacacttttttactacatttcccagaatcctccttgactcctagtcccgcctaacttgcttcttcattggccaatagtactttattcagcaatcaataagataaacatatacagaaggacattccccataactctccaaaaacaatagatgcaaagcaatttaatttgtaccgtattttacctctatgacagtttagttttgtttactaaatcaacaaaaactataatttcatactgtggcttaaaaagcttttccaaaggtattttaagtatatgttatattatttcttacttttgttatggctttattgtttcaatttcaaggttttatgagctaactatgttccttggtgatttcacacctttacaatatattggaatttatcctataccccattttctcttatttctctaccatgcccatcaatgctcctcctctctatgagtcactttctcatgttcacgactttctttgttaccactgactcactgtgtttaactaagaacctctgtatgaccatgggtttgcagattttcattggtattcagtaggctgaacagcaggaacataactgaaaacaatggctccatctctcagactatatccatagccgattagttgaatggggctaggtagggccctaggagcctctccgaattaatgattgattgttgacaagatcaggtctctacaagcccagtgcaggcaaaccattcacttggcataaaactgttcctgggcataaaagttgctgctatgaaataatattgtcacagctgtgtcacactcagaaaatggcatttttgtaaactcgttttcagccctctagtttttataatctcttcctcagtgttccctgattctttaaatcagcttttttgtgcttaaaattttctggctctgaattttctatagcatgtctgtatttctctttattggcatgatctttatcctggttagtaatttctttctgtttatatgtcacttatctgtgccacattcttaaagttgcaatccaatcatagttacttggtggagagatttttgtgaatggcataaatccatttgtgaagaccttccatgatggttgaacttaaacttcggcataaataaaaaaatcaccaaaggtttgctttttttcttttaaaaatgttctatcttactagtatttggttaaacaaaatacacattctataaacaacccagcatgaggctaacagaaaatggtaactaagaataagaatttaaaagctcagggttgtaacagagttgcatatgaccacactggaagtgttcaagtgtctttgggtcaccagttggctcccgactccaggtatatggaatcctttggatgtcacatgcccaggtcccagcaagtatgtggaaaagagtttcttctcccaaggtaatggcttatagccacctacgctgacaatgtacctaaggtcctgtttgtgataattgctagggttggttatcatttttggttggtgatggttaaagtgacatggcagaaggagagctcctgtggggccaatcaggtcaggtgtaggaggtggtacagaagagagcaggttctaaggtgatgcaccaaccacctagagcttctggtacttagcacagcaatgggcatgttggattgagttacatgtagaaaaaaagagctggtgtaaacaaacaatttggtacagtgggggagagacccttagcttcctgtgaacgaagtctgttcctatgattgatgtgtaagtcctgggctagttcttccgcatgggggaggtctgttcagtgccacatttctcaaacctgctgaaaccatagattcaaaagggctggccaggtcatttctttgacccaccccctgccttgaggtacacacacacagaaccttagatgagatgtatggtctaatccttatttcccctctttcttttagttttctaaagttgcagaaaaaatagtggcctacagctgtttgaagaggtaacggtgagacagccttgtttgttaaaggaaactgcatgatgatgacaaattgagatcctctaccatacttcatgatccacacaactcagggctctggttccagtcactacaccatggaccttcaagcaattcagtttgtttttaatctctaagaagcctgtcttgtcttcacagccctcttctcacctaactctgtccctagctagttgatatgaagtagatgtagttttctgattttgctaaaatgggccagctggaaaaattgtgcaccttcattttctattgtgccagggattcctaaatcaatgtagcccaatggtaagcatgacactggagtaaagaaagctgagccatgtctgtcccatgatattctcttaggtatctttctggctcttccagtcgtgctggcatattgaaggattcaactacccagattgaaatatcataaaatattctgttagaaaatgccaaggctggctacaagcacttaaaaacatactgaaggacaatgttacatgtttctggtggcattggtttggaagtggtttcccaagaggttgaagcttaagctcccggtcctttaagtcactcaccaggctctctgtatgtactttgtcttcagttccactggcaccacggtagagaaaagaggaggcaacctctctgtaagcctggcatagccatgagactccagcagaacctgagttaagtaacagataagacagaatgttttttttttttcttttgttatggttcacatcctgtcctaaggtacaggcaaatctgcaggggaaacctgaggagatgtttgagaagtggccatggcatactacatttgcttctctgatctactagaacatctagtggtgtggaagtcgcactagacccctgtcacctctcaacccaagtcgggtgctgccttttgggaggcaacttgagtggaccccagcacagatgggagagcaggttcatgatgaagtccatattagcgagagaaatgacttagggtgtttggagatactttttggaaagtcagcactttctgtgtgacaaatggtgttgtccttgaggaagttgacagcacggagggcatggagtaccaggtgtggtttctcatgactgatgtcatgactgcctgggccacacacaaagattcaggtttgcctttctcctttccatggcatgcaggccctgtgtttcatttcagattccagagagggctggaagcacctactctcctctcctaaggaagatgagtatctctcttgtcagagtgtctgagggctccagaagtctctagtgttatttgaagaaaaggttggaatcaaaggaaaaaaaaaaaaacctctacatttcttcctttgcaatagaaaataactttatcatcagttcatttaaacactgccatcaaagcatgggatgcaaaacgatgtataaaatgtatgccctttccccattgttttctctcatccctttgaaacaccacacctttcttgctgtatttttctctttttgaagactacctaagtcccaatggaggagggcagggtagaatcagacatactgcttcctttcttccaattacaaagttactgtcccagatgacagggcctatgtcttctggataattcaaaacattagaaagggatgattggattccatggttgcatgttggaattgcccatgactgcatgttggaatcgcttggggagctattttaagtttctgacatacaaagtaacatatttgtccataactcaacattatgatgtcctacatatttctgttttctcaagttcttgatggaaatcaatgagatctaaaattttcctttattacccagttcttcagggatgcacaacatctaaaatgtcatattattttttcgacactgtgtaataaggcaatgtgggttcaccatagaggttataaacaagaaaccattaccatgaagtttctggggctcaggtggtctatgtgcttccctgtatctgctacaacaacctttcagaccagtgcagtaatgtccttcatctcttagacctcacgcatgggatttatatacatggctcttctctaacactgaaatcagtctctttaaaatatattcaaaggaatccacagaggaatataaataacagaaggatccttcttaaactacaatcaagccattctttctactctgctctgtaacaaagatgttaatgatgtttaaatgtaatttcatataaagaataggcaatcattcctccattatttttctgttctcacctgggaccctcagtgaccttaccggaaaacagctttgctcttttcctctatttctctccatgctatttttggaccctctaatcaaacaagtcattcctgaaatgttccgtttgttttatgagtgtggcacaccaggaaggcaggcagctcacctgccctgtatcacagctgattttaactgggaaagctcccgacatctgtgcccataataaaaagcctacaaaagcaaaccaaatcatgttgctacctccatttctcctgcacaataaaggcggatcacctgaagtcacgatctgggctctgaattgggtttcagcatctgatctgatggaacaaagagagatcaatagccgccaccataaaaagtcaatggaacataaattaggagaagaatattttctaactctggccccaagcggtgacttgctggattcaaaccatacttttggtcaatgaaaaacagaaagcaactttatttaacagcagggtaggcaacactgggattctattttgtgctatcccgacttctctttattgatctctaaataatgaattgaagcatgatgatcctctctaaagttaagcttactaccaaatgttgtcaggaagtttctaactgtggctagagaattatgtgagtctaagccacaccctgggggcttctggctgtaagcaatttgagactctatgactgatctcagtgagcttcaagacagtctcattaatacattcagaagtattttagagttgtggtttaattgactgctgaggagccaaaaacctttaatttattggagagttgattggttttcaaaataaaagtaatattttctttttggatgaattaaagtaatatagaattaaggatgtagctcagtgtcagagaaactgcctagcatgtgcaaggtcctgggactgacagccagctctgtaacaaacaaacaaatgtagatattggaagagggacatgattgaataacctcatgagaatagaaaaaaataaaagtcacctgttgcatgagtatccacttttcaccagtcatgtgctgatgaatctattccatctcatttttcaaatgtactcacataaactcaaaagtaatgcagagtataggtagttggcgatcattgtgataaataacatcttcccactgttgtttgaattgattaaaaatatcagtaaatgggactagagacatagttcagtagaggacctgaattggtttcctagcacccttgccagaagacttataggtgcctgtgccatctccaggggactgaactcctgtttctgggacctgtggatacctgcattcatgtgacacacacacacacacacacacacacacacacacacacacacacacacacacactaaaaataaaaataaaccttaaaagttatctgtaggggaagctgtagccgtgccttcttaggggctgactacaggtgtgcctgaccacgcttgtgagggcgtggtcaggtcagagtgacgtagtgtgactgcgtttgctcttttggtttcactttggtacttgctgtacagactgctgccacactggctggctaggtcgctctgtaagtaaggctattccctattaaatacccttatatttctacctgactccgtattggtaatttcccactatagttatcagcaaaggtttaatgcaaatagagatcaaagtgtcacattaactaccaatctacaaatgtccagattgcagagcagttttatggttgaagaggatgtcctgaataccaagatccattgatagacaggcttcctttcctaccatcaggtgttgcaggattactgctggccctccatggaggctaggatccttctacattaagagtgctggaagtcagagagaagaatggagactctgctgccagctgcttccatagataaaggatggacaacatatattgcatttttgagatttaattaattttatttatgtgtgtgtgactgtgaatggataactcatgtatgtatgtatcttcaaaggccaagagaaggtgtcaggtcccctttgagctggatttccagggggtagggagctgcctgaggtgagtcctgggaactgaactcaggtcttctggaatagcagtatgtgttttcacttgctgagctatatctttgaaccccacatatctattttatccttaaaattaatcatagttcctttctgaggaagtattgggcatagaaggtgtgatatagtgccagtagtgttttctttaactgagatggtaaaacctttctcttcatgatctgtcttcttcactcagtgtgtcacttgactttgcatattgctctaatgtgcttccttttggtgcatgaactacataattcaaaactagtataagcgcctttttttttctttcaactggttttaacctctatggatccatgacgacaaatcatggtgatgttgaagaagaaatgaatctataggaatctaagatggcccttgacactctgtcagaggacagaacctgaagcagccacagggttgtaatactctgagattacttggtgttggaggatatgggtcattcagatcactccaagtatccatttctaccaatgtttgatagttgcactactatttttggtcacctctgtaatttacaatactataaacagaccattctctctgtttttttttttaatcaattttcaaatgtattgtccaattaccaaccaccccccattcctcttcttttcttttttcaagatagcacctgtcttgttttcctgttgctgtgatgataccctgaccaaaaaaaaaaacaactcaagggagtgaaagtttgtttcagctcgtagttccagactatagtccattatagctggaagtcaaaggagtaggagcattaagcagctagctgctcactcacatccaatcagaaagcagagagtgatctataatggttggtgctcagcttacacacacacacacacacacacacacacacacacacacaaaacctatttctattaaactatgtattgccacaagactgtggcttacctgtaatgctccagcatgttacgcctttgaagttacatggcatccctatggctactctatgcttcttcccagccttctcctagtctggtagttccacctatacttcctgcctggctacatcttgcctgtccattagcagaaacagctttattcaccaaccaagaagagaaacatattcacagcatatagaaggacatcccccatcatctcctcctttctgtctaaataaaagggaaggttttaactcttttttttgttttttttgggacagggtttctctgtggctttggtggatgtcctggaactagctcttacagaccaggctggtctcgaactcagagagatccgcctgcctctgcctcccaagtgctgggactaaaggcatgtgccaccgccagtcaggctggaaggttttaactttaacatagtaagattatatataacaaaacagttatcaagctagaactatagctaacaatatttagtccatttatatttggcaacatttaaagaaaatattctatcatctatcctatttttgtgagtcttaagctttgtgtgtaacttatcttttaccataactaagggaaaccataaccataaccatctgtcttcaactccatcacagaccccagaaggataatatataaactctagaattgacaaagacatctcacatcctggacagtcacccaaagatcctctgtattcttgggccatccatcttcagcctagagtgtctggcaggcttctcagagaagcaggaaatttgaaactgtactacctgtattggcagtttgtctatcatttttctctgtgtactgcagaatgtctggcagactcttccacgaagcaggaaccctgaaggactgtcccatcttattttggcaagttcagcagttactttcccgtgggtctggcatgtccggtttatacagtatacagtcaaacattctaggcaagagcagtttcttgtctaaatgactaatctttccacattgaaagaaaatcccataaggagcttcttcaatacccatcttcctttctgatgtaattggtgttgccaggagcaaatgtgtctcattgtcatgaaaacactaacaaaccattttaaatgccatattctgaaggtctttgaaaggttttgaagaatacctatccatttgaaatatatctctgtatatctagaaaacataatgtaagttttgactattataggtgactatctataatctgtatttagttatatattacattttaaagaactgtataaacacaatccctaaacaagagtagaaacatgcatataacaaaataaatttgtaccaataaaccaaaatccattccaatgcaaagtattcatttctatgtcatactcctttttttctttagaaagagattgactgtgatcattaaccaacctcatttaaatgtaaacaaacacttataaacaatatttgggaatatgggcatagttatatccaaattgcttcctgctgtttgggggtgccattaatcccaaggggatcttgagaaaatttagaaccctgttcaaatcctggctgcatcatctcagctgttttggatgttggatcacctgggccactgcttcagggggtcttgtttggtcaaaccatattagtctagaaggaatccacagcttttcattttctgtggaaacaaaagcagaacctcttttcccaagagacatgccctcagacttatgtcttgaagtcaaggcattttaaaaatatatatgttgaattaatgcagcagcatttacaatcaaatgtcttttagcttcttcctcagcagtcaaacaattcaaagacaacataataatatacagtatccagactctgtgtattttccatctttatgtgacttttattactctatttcttttacttttattttttacttttattttttggctttttgagatagggattctctgtgtatctttggctgtcctagaactctcattttgtaaaccaggctggccttgaactcacagagatacacctgcctctgcctttggagtgctgggaataaaggagtgtgccaccaaatccagctactttatttctttttttaaggacttcctctatctttttttctctctcctaagcttacacatatttttaaacacactgtgtactctttagaggttttgttccttgcatctgtctttactgtacgtctctatctttttctgaccatgagtctttaatttgttaactagcatgactaagattaaagtggtagctccttggctttctgaaagtctcgattcatggcagaggtgcttgtgggagccatgcttattgtcacaactttgtggagtttctaggtccatgtcactgccaaaaagcatgctgctggctgctcttaaacaccatttaattttttggtagcagggcctcttgaaagagccttgcagtttttgccactaattctgagtcaggaagcctctcttaaagttttcctctagcaaacagagcccacccaagaaaatgctgctaccaagaagccatgcatgattctgttcttttgtttttagaatcctttttaaagttaaatttctgttctttgtaggtcacccagtttcaagtattctgttagagtagtacaaatgaagtaaatcatctggccaattgagccatggcttagcatcatcaaaggaaataatttgaatgtatcttttgaagtcatgtataaagacttccatgtagtagtctgctagtggattctgaatgtcaaatactcctgtgattgctctccatcttatctatctatctatctatctatctatctatctatctatctatctatctatctatctatctatctattttttgaggcaaggtgtctcacagaacccagagcccacttatgtggcgatcccaggaatcccatctctcttcctaaaacacccgagttacagggggcgtctatgccatttttatgtgggtgctagggatctgagctcagatctgcatgctttgtgtacccctgttttactcactgagccatcttcccagcccctacaacttactaaagagctgtttgagagtcctggtaaagttgagataaaagcatagatttctcaaatagcccctatcagagtacggcattttcgggacctgcatggcatgcattgccatgtcatcattaccccaagtttacagcttatgtgaagcatcacttttggtattgtacgttagagaagttctgaccaatgcagaattgatgtaacattatgaagatgtcatagtttcaccccagtgaggatccgctgtgctcccatttgcccccttcccactctgccccaggccatagtagctgctgattgtttactccatagttctgccttttgaaaatgctttcattcagatggaaacatgaactatgtgaccttttcagattgacttattccacttggcaacatgtatttaaattttttttatgccttttcaaggcttggtactcatttcttactggtgatgaataattgtgggttgtccagaagtactgcactttagtcagtcatttctattcacaaacctactgaaggatatgttggttacttctgagagaaggcaatcattactacgttgctataatcattctgtgcaggtttacatattggcacctgtttcagctcctctggaaattgctggtgagatgcattcatggctgagtttcttccctcagccacagtcaacaaaataacaggctcccaatggcattccttactttgcttactgtgtttttgtttcctagtacttctttcttagcatccttagaacttgcatctttctatttacctttcctgactgtccttgcatgtggtctggctctatccacttgaccccttagcctatgagccctagttgctttaaattctcaacatagtcaccaccaaatgctctccttagccgagtatgattttgatgcatacttcatcttctcaaacattttttaaatttttttttgtttatttttgaaattgcatttcaattgctactttcctccttttgttttacttcttccaaaccctctcaactctctttcaaattcatggcctcttttttcatcagttgttattgcatgcaaatatatacatttatatacatttatatattcctaaatacaacctatcgggcccatataatgttccttgtatgtatgtttcagggctgaccatttgacactggacagtcaatgggagtgctcttccctggggaggatcacctcttccctggggaggatcacctcttcccactccagagtcactcagttgtctgtatttctttatgtagggttgagactttggaggcttttcttcacgcagtttagctgacaagcatgccaacgtgtcttattttgaagttttattatgtttttcctttttggctagcccaagtaaagggagttacagtaaatagacctttgatactatggtggaagtgtgtaggggctaggaagggctctatagtcccgtgatcaggcctgtgttgtgaccctggaactctggaacaagaatgtagaaagtgcacattaatttttttctcctttagctacacagtttggttgagttaggtattttccttttcctagtaattaactatgaataaaaataaacttcagcaaattagtgtctgttaaataatttgtacctgggaggggctgaaaggaaggaagggaaggggcaagtgaaatgattctattttaattaaaacaattttctctgaggattccttttcttttctttttttcttttaaacagagcacgcaagtcttgaaattgttcattgttcctctcactgccagaagcaggagggttgttctcttgtcttcactgtgagggacctactagaggtcaggaagcaaatgcacagaaactccttggttctccttagaattaggtctccgggagcactctcaagctggtgcagggcagtgcagcatcgcctgctgtgacactggctttcaggaagatgtccacactggtaagctgtggtcctgttcagggctcatgtctgtaatcgcggggctgtggtttgctctgtcacgtgacttctcttgtccgtctaggaagagttgctgatcttcctgttggatcagctcttcacttactattgcagagttgagactccttggcttctcacctgctgggatgaaccagagggaaacactctttctgcaaaaagaaacttatcttggtttctgttactttctgtgttagcttcctgattgctttgcagtcggatacttattctgatttgattacttttctgggcattaggttttcacaatttcttacaacctacaatttactatttaaagcactttcatctatgtatatcattgtactttgctcacaccccattgtcctctctagttaacatttcattttattttactgatagacatcttcaaggaatttctaggaaaggacatatgaggagcaaacatttgagttggaaatgattttattttaccttcttgcttgaaccgatagcttggttgtagaattttggattccaaattatttttcctttggcctggcaaaccttattctacggtcacttagcccttgttgctcattgtaagacagaagctgatgtccattctacacatgcttctgtgttattttgtttgtctttgaaagtctaaaattccaccaaaaattctagttgttagtttcttttagattccttccactttaattccatttgaagaagcatgtcttccaactttgagaaaaatccccattattcttttgataatttcctctttgaaatttcaaaattctttctgttattggacttgttttcccaattcctagtatcttaggcaatgcttacatttgaatgctaatttttcaaaagacttactttgctagttttccctgtaatgatatattttctcactgtatctggttttgtcctgtttggctgtcatttcttgtaggtctgctcttttctgaagtggaaacagagagggagtggatcttggagagaagggaggtatcaggtagttgggaggagtggaggaaggagataatgtggttaggatgtattgtgtgagagaaggttctattttcaataaaatattttacaaaaatttatttattttatttttttatgtatgagtgttttgtccacatgcaggtataagcagcacgtggatgcctggtgcttatggaggtttagaggagggcatcagatcccttggaactggggtaacagacaattgtgagtcaccatgtgtctgctttgagcctacccaggtcccttgtaattttaaaatatcaattaatgatgcttagccaagtcagtttttgtattgtaaatttcaaaatgggggatggagaaatggctcagaggtcaagagcacatactgctcttgcagagggcttgaatttatttcccagcacccatatcagacagctcaaaatcatctgtaactaagtctaggggattttatacctgtgtctgatctgtacaggcattcatgcacattaattaacctatgtgtgcgcacacaaaccacccgtaaaacaaagctaacttgtttccccaatttctagtatcttaggtaatgcttacatttgaattctaatttttcaaaagacttactctgctagtttttcctgtaatgatatattttctcactgtatcttgttttgtcctgtttggctgtcatttcttgtaggtctgctcttttctgaagaggaaatagagagagagtggatgttaatttgtttaacttgatttacagttgataatggatgttgtttatacagaaatcccttccccacttttctgtcttctttttttttttttttgagtttcactaaccagtccaagaattatttttgaggtggggtcacctgcagtccaggctggtctcataactcactatatagctgagaatgactttgaacttcacatcctcctgcttctactgctcaagtgctaggactacaggtgttggccatcatgcctggtttatgtgatgctatgaatcagacccagggctttcaagccctctaccagcggagctaatctgcatcctctgatggagttaatggtctttcaaatgctatgcttatttatagctagtattctttacggtggccaatgtcctacacatcagctttagggggtgatagggggtgatagattaagctccttatgtccctttatcatgactcagctgatctttgagtcagttatttcttctttgacacagatatctcaggttgcctcagacatgtctgccctcagcatggatccagtcatttctgcaggaggcctgattgcttgcaatgaggatgctatctaaaaatcaagagctgagtgatagacatacttcttgttattgcttctgggcatttccaataagtagagctagaaaaagccttgaaatctatgtcctttctggaaatgtaaaatcacagtgttttaataactcattttatgatttttttgtaacactgaataatctttgcatctactgacattaatagtctcatttgcctgatctgataaagtgatgctcatacggacaggattccacatctttattgtttctttagcttttagactgtagcacaggaagaacaagcagccagtttgcagtacttgaaaagaaaactccttgctttgggtgcttatcagttttgtatagttaagattctttgtttctgtttacttttgattttagaattaatataacttttgaacagataaaaagttgacattattagggggctagagatggttcagcagtgaagactactggctgttcttccagaggactcaggttcttccagaggactcaggtacaattctgtttttcttttttttttagaatttagattttttttagattgttttatttattatgtatacaacattctgcttccatgtatatctgcacaccagaagagggcaccaggtctcataacagatggttgtgagccaccatgtggttgctgggcactgaactcgggacctctggaagagcagttagtgctcttaacctctgagccatctctccagccccctcaggtacaattcttagcacccacatggcagctcacaactgtctatagctccagtggatctgacaccttcacaccagtgcacacaaaataaattaaaaaggaaaaatattgacattatcaaattattgtcacagctttctttaccctgctgctttgtgacaccagggctgggaatctgcaagctacacaccacttctttctaccctctcacttccctacttgtcttcctcccttcttctttttttttctcattggccaaacaatactttgtcatccaataagacaaacatatacacagaagcacttcccccatcaagaactcccaaggccactcttcattcaatggcatataatttggtttggtgtttctagttgggccaaggccaaggctgcagcacatgtacaagtccacttttagatggctaaatggtcttcctcccttttttaccttttattgttttctgttatttgttcttttaagaaggtctttccatttaatccaggcttgtccaaaacccatgatgctcctacctgtgtctcccatgtgctaggattacaggagtgtactgccttgctgggctttgccatggttttcaggacactgcagggagatgacaaggactttcctgttgctttctgatttctctccatggggcttgtctgccagggtttgtccttgtgcatgccaccccagcttctagtcagatggtttggggatgtaagttcaaaggaagttcctgtgggaaagaggttagtgggcgggactggcttccgatgtaattgagatgatgaccttggaggaactcctctatggaaactcctctttttgttcatttttctttgtcattttcttttgtggtgcatgtatatgaatatatgtaatatatatgcaactttaatttgttttatatttaaggaagagtgagatggagatggagagctatgcaggagattgccaacacaaggacttctctgtgtaaaacattcaggaaccatggtatgctaggatttgctccatatgtctgattaaaaagtcaatgtcagaggattaacacccatctctagtagttgttgttaggaggagaattcttttgcctgttgttatatgccaggatacttgtgttaagaatgaacctgaaccggcactcccctccccccatcatggcgtcctcaatgctggagatcaaacacaggctagagtgtgctaagtgagtgctgtatttctgagatacacccctagcctgggtgtctgtgttgaaactgcagtttgtgaatagggaaactattaatgtatatagatttaaatcatttccccttggcctcaataggtctgtaaaaatgaattgttcctagttttatgtcccacttttgctttcacacttaactatacctttgttccaacagtgcacaatttttatagagattttttccctctcagttcccatgtgcaatatagtccaactccaatattattctgggaagcatttgaggtcctttatgcatttctggcctatattctattatgagcttatactctttatttttggctgttgtttcaatgtgtctttggataaaaaaggaagaaaatcacctatcaaaactatcaaacttgaaccagaaatttgtttcccagtgatctaggaaatcagattatgtgtttcctataactgctgctctagtaagtactgtatttgatcttggcttagtcatggtcaaataaattgatcttgcgttggtgaatatttggtgcctttcaatttttgtttattataatgagagataatccttaaagggggctggcttaattcactttaatttttcatataaaatcctgctatggtaaccatagatggaacttgtatagagatggtcagttgattactgataggaaaactcggtgattacaatctctttccaaagactgtgagaaaggtacctgaaggtctttgagaaggccacaaacatagtcttgggaaggttgcacaggatggtagtgcaggtactgttctaagtgtaggagtcctccacatcagccaccagcatccgtgcctccgtgtccttcactttgcatgagagggtgttgaactgcctgattttgttttcctagtagtctccctgcacagaccaatggaaagcatggtaaaggcagcatccagatggtggtggctacctctctggagcactggacaccaacatgactgttgtagccaatggtgacagatgccttgaatctgtctgcaggctggtacaagtttgtttgtatccgggcgtgacttataaagtcacgcccttgagaaatgactaagggaacaatctacatctcagacttcttgatgggcagggggaacaagtagtgctcttctagggacatcttgtctttgaatagggggtccagcctggtgatgggatgcacttcctgcatctagccttggccttgatgtttatatgctcagagcctcatccagagatgattgtttctgaaagtggagcctttgaaatgtagttaagtcatgaggtcagaatccccacccatgggatcaatgcctgtccattttgtgttgctataagataatgcctaagactgaatagtttatgaacaatggaaattctcctgtcttgtggctctagagacaaggaagttcaagagtgcggtacttatgtctggcaaaagccttcttgctatgatatcctatgacagaagtcagaagggcaagaagagtgtgtgagacagagaagacggagagaaattcacctttgatcaagattttacctcaggaaaaatgaaacccctccaattatgccattaacccactcaggatagcagagacctccacaaatggataatttaaagatcttatcacagccaggcagtggtggcacacacttttaatcccagcatttgggaggcagaggctggtggatctatgtgagttcaaggccagcctggtctatagagtgagtgccaggacaggctccaaagctacacagagaaaccctgtcttgaaaaacccaacccaacccaacccaacccaacccaaaccaaaccaaaacccacaaaacttatctccttagtatcatcattgtacagttaaatttcaacatgaatgttggagagaatattcaatccatgctagtatctttttaaaatcaaccggagatctagttagcccctcccacctaatgaagatgtagctaaaagacatgtttatgacccaggaaatgagtctccatgagatattgagttagctgttcattgatctttgcctttttggcctccagaatggtaagaattttgttaacttgactgaattaagaaatacccaagagattaataaaacactccatgcacatctgcaattgtgtttccagaggcaattagatcatacataatgagttcattgattctttgatgtattcataacatgctgccataattttgaaatgatgagcactagggtatggtgaaatatagttggaaggagtaggtcattgggaccatgtcctattcatctacaccagtggttctccatcttcctcattatgaaaccctttaatatagttcctcatgtcatggtgaccctaaaccatacagttattttctttgctacttcttatctataattttgctactgttattaattttaatataattttttttttttggagatagaggtttaccaaaggggttgagacccacaggttgagatctgctgatctacatcttttctgtatttacttttcttagcttcttggccatgcaaactaatatgtgatgtctctaagtcacatctctgtagtattctattctatttgtctaaatgggctgagacagttttatgagtagcttagctgctgctagtttggaaagctgtgtcagtctgaactcagccaacaatgtagacatttggagatttggctggagccaggcaaaatgcttctgagatgattccctcctagtactagaaagttctggctggttagacccccgtttctcagcacaggaaagcttctatcctgtttgaccatctttttgacactgcagctggatttctcctgaatatatgattcaggagggagccaagctgaaactaccatgtcttttataacaaatcttggaagtcaaatgatcattttctcaataacttattggttacacaggccagtcttagtcaaggtgagagagaaatccatggggcatgaatatctctagacactggcatcacctcagaagctggtaactacatgtggacaggctaaatttagaaaattgatacatgcaggaagtagtagacaaagctgaagaccattgagggctaataaatgacatagaaagatctgtgtgcccaagaagccaaatcatcgtctctacttcataacattaagaaaacgatgtgtgttaaaattcttttcaaaatgaatttaaatatttgtacaaaatgactggtctttaatctcaatatttagtcaataaatattcatagtgtcacttctcatgttagacaaggaactaggcaaatttacttatttctcagataataattccattttatttaatattacattattattgtatttttcagatgaagcaactgggctaggatggtgtggtgcatggtggttttgaaaaaactggttcccaaagagaggaatggcctagttggagtaggtgtgaccttattggaggaagtatgcctccgtgggggtgggctttgaggtttgctgtgcataagctatacccagtgaggcaatttacttcctgttgtctgtggatcaagatgcagaaccttcagctcctccagcaccatgtctggctgcatgctgccatgtcctgccatgatagtggattaaacctctgatattgtaagccacccaattaaatgtttcctttataagagtttccatggtcatggtgtctcttcatagcaatagaaaccctaactaagacagatagattaaatgatcaggctgtttcttgactcagaagaggtagagttaagttttataattgagttctatgctggctcccaataaaacatcagtataggatgatggacaaagacagaattgagccttattcttgatagcatatacttgagaacagacacttcaagtattttagagagtattttaaccagtctgatggaaatcagtgtggccttctgaggacgagaggaaatttttctataaccactgaatgacaaggccagtttttgaggagaaatttatttgcttctgggattctttatacaatcctagtaataaggtagagatttgtaacaacccccacaatccacaaaccatggggagattctgcctttggaagaaacaaaggcatgcttatccagcaaatcagttgtattttatttttaaagtcaagtattgttcccaataacccaatagtgtttcattggcctgagaatcactacatgaccactgaaatatatctttttcagggacagtatccatctctttaaagagttgtgtagttgtgtctgcttgtaacatgatggtttggtttcatacacttggtggtaaagtaaaacaagccccaatgagcaaaggtgtaaagactgtgctggagaaacccacaaaaacagctggcctgaccaagtgaaagtatatggaccccagtcataaagctggggaaccagcattgaaccgaaccaagccctctgaatgtgggtgccagttagaaggcctggacagtttatggaatctctaatagtggagccagtgtttatctctagtgcacaaatggactttgggagcccattcaccatggaaggatactctctcagcccagacacatggaggagggcctaagccctccctcaaatgatgtgatagacgttgatgatccccatggaaggcctcaccttcccgggggtggggtggggtggatggggtggtcagtggggggcatgggaggatggaagggagagagaactgggattgatttgtaaaataatattgtttttaaattaaataaataaattaaaaaaagtaaaacaaacccctaatactctgtacctgaggacaataggatgacttgggtgaaatccaattgggataagctttcagattcctattagagttgatcttgagtattcaaatattcgttgagagctgttgtaacctgctcaatgggttctcaatgacagaatactgaagaactataggaaattagttttgctgggcaatagtatattgcttttcttttaatgaagaataataattttactgaaaatataatccatgttctaacaggtggacatttatattgtttcaatattaaaaaattatatatgattgtatgaggccatttttctgaaagcatatgctatttgggtatatgagtcccttagcatcccaatatgctttgctcttccctcctcccattagtcagtctcctttgatatagagacagtttcacttctactttcataccaccagcaggttatgattttatgtatctataatgtctagtacccacaaatgagagaaagcatctgctactaatgcaagtctgacttaatttgtttaatacgattactgcctattgtatccattttcctgtaaatgacataactttattttccattatggctaaaaaaaattccagtgtgtctataaggtacatttcttttttaatccattcttctgttactgaacacctcagctggttctacagcttagcccttgtgaatcacgtagcagttaacagtgatgtgcaactggctttgtgttgacttggattcctttgggtaaatgccaagtagttgtatgcaaggtctaatttcagttttttgagaaaggttcctactgattgccacagtggctaaattacattcttatcaacagtgtataagagttttctttggtttgggtccttgtcagcatttgctgtttgctttttttaaaaatgaaaacaaattaaaatttattttataatagctttttaagaactttattaaaactataacataatacatcatttcccctttcccttatggaggcagggaataaggagttcaccagacgcaagataaatggtaaataggtgttttattgggtaacaacttacacagataaaagtaaataaccgccacggccttcctgctccagaagatgcagtctccgcccttctgatgctctccgagacccaagagagagtgcctctgcttaaagcagtcatgtccgcacctgaaaccatgcccaaagggtgtcggcattgctacaagttcactggcaaggcaagatgccactacacccttactcacttcaacccctgtttcatcccccctctcaaatttatggcctcttgttctttaattgttgttacatgtacacacacacacacacacacacacacacacacacacacacacacacacacacgctcctaaatatataactacaatttcctaggtccatataacgttacctgtactcatatgctcctaaggctgagcacttggtagtggataattaatttggtgtgctctttcttggggaagacctttctcccactgtcagcatttctgagtcgcctgtagttctttgtctatggttgaggccccaaagagctttcttccatgcatgttagcatatccatgggtgttgtcaatgtaactgcttaaacaagacctggacaatgatgataccaatgttgtttgtgtacttagtgccctttcaagtggggtgagttggaatctctgtggagtttggttttgtgtttctttgatggctagtgatcatgggattttcttcatatgttttgttgccatttgcacttaatcttttgagaattgttacttattttattagtcaacttgctgtttgggttacttgatttcttgtttgtttttgagttccttgtggaactttcagtccaaccacgcatccatccatccatccatccatccatccatccatccatccacctgtttatctacaggtataaatataggtataggtataggtataggtataggtataggtataggtataggtataggtataggtataggtataggtataggtatatgcctaaatataaatccatgtcagaggctgtctttttacttcgttccttctctgtgcaggagttctaaatttttcaggtccgaattttcacctgttgggctatatttcaatgactagagtttattaaaaacaaacaaacaaaaaaccaagtctatgcctaaacctttaaatgttttttttttgtacccttttctctatcagttttagagtttcaggtcttacagtaaattcttcaatttatttggactgttccactcattgaagatggtgtctcttctccaagtacatattttatcacctttatcaagaatttgatgactgcagctttgtaagttaatttctaggttgcttattctgttctgttgatctatgtgtctgtttttaaaaacactttcatgctgtttttgttaccatggctttgtagtataacttaaaatcatgtattgccaaacttccagtatattttttttaactcatgattattttttttgctcatgacaactttgactatccagggtctttcttgcttcaatatgagtcttaagattttttcctatttctgtgaagaatggcatgggagtttttaattggagttgcattgagtttgaacattgcctttagtagactagccctatttacaatattaattctagtgtcttcttcagttgttcacttcagtattttaaagttttattacaatgacctgtggcttcttggttaggttcagtctaggtattgttttaaggcaagggacagcagtatctctgctggagttttatccagtgttgctttaccagcttcagcattgtcatctgtgattgacactgccttttctctccactggtcttacagaaataggaaagggtcacaatttactctggttacatcgcagggattgtggacttctggaaacctctactgaactagaaagaaagttctctctagttaaggtaagttttgtcttgagaaaacttatatgtcattgaggctttggtagccctctgttttttttaaatttaattaattaatcaatttattttacatgtcttggtgttttttttttttttttttttttgcatgtatataagtgcaccatgtgtgtgcagtgccagtggaggccagaagatggcactggatttcctggggctggagttaccgatggatggttgctgggaactgaacctgggtcctctggtagaacaaccagtctcttaacccatgagccatgtctccagccccaacctctatgattctctcttttcttactgtcttgtttttcttgcaccaactattctcttgttctgcattttaaatgatccactcctgtctataatcatcttgttggctggtttctgcttgttttctggttttactgttggaatgaaggccacatgagcatggcttccacaccttcaccagctcccagaccagtgcctgagagttaaacagagctgcaatagacacatgttgcatgaattactgtgttcattacaaaggttcaaggtcaaagctagcattctgttcagatcttattactgccattatcatttaggataacaagttcttttcagcaacttgctttccttagtactgccattaaattctgacttatatgtgaaaagaagactgaagtgtttagaaagaggcaccctcaacgacgattggcaggtgtctctagtacccaggcccttttgtcccttagttgctattttaagtttagcttaatattttccatttatagtgaatttaaactatatttgatgtgcaaacagactgtaattttgtttgcttgtttgtaaaaagtagctgagtctcactcagctaatgacaagtggccaactgttcaaattggacagataggagctgtaaccaagtgagctatcactaaactatcccaccctttgtgtttgttaacctacttatgtgttgggaccaagaactcagggccattttcagccttgttatgtagtgatggtttgtttttcatttaaaattttttatttcattttacattccaaccacagttctccctctcacccctcctcccacccccaatattttgtttgtaatctaacaaataaagcttgcctgaagatcagagtgcagagctaagacactaattagctacacacatagttaagagctaagccactagttagctacacatacactaagccactagttaaccacccacatactaagccactagttaatcatagaggacagacactcaggagacagaggcacatggatatctgtgagttcaaggacaccctaggctacatgagaatgaatttgtctaaaagagaaccacagttcatacctttgatcccagcacttgggatgacatgccgttaatcccagcactagaggggaatataaggcaggagctcagtgcagtctgggtgcagtctgaggctttggtggacagtattgcagtctggttttgctgaggacagtatcgcccctctttggtcttatccttggtcaagcgactctctagtggcttgggtgtgtggctaactagtggcttagctcttaactaggtgtgtgactaaatagtggtttagcttccctctgttcttcaggcaagctttagtttttaaattacaaacgaaatatcactatggtgtcaattttcttttttctttttcttttttctttttattttttatatatttgaattacaaacaagattgaattacatgatgatcccagttcccttctccctcccttcctcctctacccctgcccccaactaaaatcctatttgtcatatgtcctttcttctaatctacacctgactcaaaatttctgcttcctcatgacctctgcatccttccttttcttctcttctcacttttgtagcttcctcccccctcttcccatgttctcaatttgctcaggggatggcgaccctttccccttctccaggggacaaagtttgtctcttttagggtcttccttgtttactagtatctctggcagtgtggattgtaggatggtaatcccttactctatgtctaaaatccgcatatgagtgagtacatatcatgtttgtctttttgtgattgggttacctcgctcagaatggtttctttgagttccatccattttcctgaaaatttcaagattccattgtttttttctgctgagtagtactccattgtgtaaatgaccacattttctctattcattcttcggttgaggggcatctaggctgcttccagtttctggctattacaaataatgctgctatgaacatggttgaacagatgtccttgtatgaatgtgcttcttttgggtatatgcctaggagtggaattgctggatcttgtggtagactgattcccattttcttgaggagtcgccatactgatttccaaagtggctgtacaagttggcacccctaccagcagtggaggagcgttcccctttctcaacatcctctccagcataaactgtcattggtggttttgattttagccattctgacaggagtaagatggtatctcagagttgttttgatttacatttccctgatagctaagaatgttgaacactttcttatgtgtctttcagccattttagattcctatattgagaattgtctatttagttatgtaccccattttttaattgggttgtttggtgttttggagactagcttcttgagttctttgtatattttggagatcagtcctctgtcagatgtggggttggtgaatatcttttcccagtctgtgggctgtcgttttattttactgactgtgtcctttgccttgcagaagcttctcagtttcaggaggtcctgtttattaattgttgatcacagtgtctgggctactggtgttatgttcaggaatcggcctcctgtactgattaattcaagggtatttcccactttatcttctagtagtttcagtgtggctgggtttatgttgaggtctttgatcctttttgacttaagttttgtgcaggacaaaaggcttgggtctatatgtagtcttcttcatgttggtgtcaattttctaccagaaagtatatcagctgtagttttctatttcaactctgggagaacttgagagccttctcccgaaggctttaaggctccatgatgggactcattgtcatgccctgtgctcgcttagatgcctagatgccttgctttctaccagttgcttctccgtccctccatgctttgttgtgctctcatttaattcccaaatgaactctttacacatgaatactggattcagggtctctatgaatcccaaacttacacagatgggaatatttttcataaaagttttagaaaagcatttttatattttatttctaagtgagagcacatgcacaactattctgaaatgaaaataacttggacagaagcaagatcatttccttctttatagcataggtttgactgtcttttaattagtttgcatattttaatcatgcaaaactacatcaatgacaagcctggcaagatatcttcagtggtgcagttgtggtacttatatcttggggggtaaccaacaactgtgtaattgggcttaatgcctactcaatagagggactacataccttatgctgaaaacataatcactacttgtggttaatgaagtcctggaacctagaggagaatctactgctgtttcttgcctaaaccagtataatttctaactgcattttaagctccaacaccttataccttatacctacagataactgtaactctcacccctcactgaaaaaaaacttctttctgcaatagtgagagactattttaaaatgttacaaagagcgaacaggcagagaacaacaagcagtggggtccctgaccaccactgatgcatctacagcacaacccctacacctaaggctcagggcacatgacagaagagggacctgaaagattgtaagagtcagaggaccagatgtcttctgttagtgtcttctatatacgacaggtaagctgcacatgaaaactcaacaatctggtcacttaaatgagacatgcataatgatcatgccatttgatatgccagtatcaatggggacgtctcataagaccccattcctagatgaagagctacaggcaattaatggcttcggagagagggacaattaatcttctctagggacaagaccccagattatgcagttctaagtgatcatcattgaacccatgtatttatcgtgacaaaaagtgaactcagcaggttttatatagacaaatataggtacatgtatataaaaataatgaaagaagatgccatcaacaatttgagagtgatgagggcacacgaagagcttcaggggaatggaaatcatgtaaatacagtattcgtgtatgaaactcttgaaataggattaaattaaaatcagtatcattatttcacagagatcttcatttaaaaaagagctactggatagtttaacatatactgtaattgaatctattctattttaaaattaatttagatttaaattaaaacatagttagataaatttcttccctttactccactaacccctctagtgtcttcttcctttagcctttctcacaccccttaatacttcttaaattcatgtcctcttttctttgattaataatatatatgtatatatatatatatatgcataaacacatccatatataaataaagtctactgagtctgtttggtgttgcttgtatgtgcacgacttcagggctgtgtacatggtattagataaccacttgtagtctccttcctggaggagactaattctccctcttctcagcagtcattggtttactggcccctgtcagatttgtcccttccatgttagcatgcctattggtgttttccttgttcaggctcatttagagagccatattgttgtggtatcacgagcattgcttctccataatttgtaatataaacaacctcacagcagactttctggtcctctggcccttgcacattgttttctggccccagcttctgtgatggtcctagagctctgggtgcttgggttgcattatagattcatcacttggggctgggcatccagtgattagttgctgtctatattatgtccggttgtggcttttctgcaatggtctctgctgcaaagagaggtttctttattgaaaggtgagtgctacatttatccatttgtgtaaggtttcatcctttttctatggatggatatttagactgttttccatgtttggtgaatataacttaaaaaacaaaataaacagcacaactttatttttatttattattttgtgtatgtgtgtagtatttatgtatgcacatatatgtgttcatgtgtgtatatgaaggtcagaggtcaatgttggatgtcttcctcagttactccaccttattttttggatatggtctctcaataaacctagaacttactggttcagctagatgacttactggatggcaagctccagtgttctgcccgtctttcctcacctgtccctctctcccagtgctgggttacagatggatgccatcttgccctgcttttacatgggtactgggaatctaaactcaggtcctagtgcttatgttgctaataatttacaaactgaacaatctcatcagtccaaataatacaatcaatgttagacaaatatccccttccttccttcctcccccttccttcttttatttcttatcttttttcttttttcgaggctaaattcctgtctgttggatatttggataaaaatgcatatgtattttgttagatattaccaaactctactttcgggagtataatcattttcctgggactctaataacaaattactacaagttggcagtttaaagcctagtttctcataatggagtcacaatatcttataaatgaatgtgaggatcatgaaaaatttggcagcaatgaaggtatctgaatatgcaatgaccataaattcagaatcgaatgtgtactggatttgaattgttcatgcaggtcttgactgggatgcatctcaaagcttcccagcatcattgattctgtgcaagaagcatgagaacttcaccaactaacacagctcagatgtaagggtattgtataatatgaattgtaggttttttcactacacatacacagttctctgctcttgtagaagcatagtggcttaattatggaaaagagacaatattttcctctcgtcatgcctcagcttataaagatcaaatttgtaatcctgtgttagaatgtatgatttttatgtttgagctgctggtgagtttcataaaaaaattgctaaatgaattttagcttgttattaggacagaatttctagcagtctctgaagtggtcctaaatatactctttctacttcacattatctatttatatggaatagtaggcattcttagtatttacgattatatactgatcactctaaaaatactgatcactctgtaacaaaattaaagatgtcttatgacctaaagtatcaacaattcagccactatttaactcttcatgtaaaaataaacaatatctttctcactaggatgcaaattaatttttgtattcaataaatggtaaaattacttgtaaacagaagaattgtctcaaaataaatttatcagtaaatgtttggtttgtctatcacacacacacacacacacacacacacacacacacacacacacacacacacacacaactcagggtcatgtaaatatttcctggataaaacgggatcatggataggaaaagtttatgcaactttggttgaatacaatagcaatttattcttttattgagagtggaaaatctggagtctagctatggacagggcttcactcctatcaaagcttctagggatgggacaacggattcttgactcttctcaatcctgatggtttctgaagtactcagtgttctattttggtgatttagctagatgacttactggatggcatcctaatgtgatgttcttctcacacctgtgtctaaacttaccttttttcatgagggcgccagtaaccaaggtaggtcctagcagaatccatcatgacctcatctttactttcacttgtgactaactgatttctaataatctcacattcacaggtgctgtggattagggtttgaacatatctttctacaacgacacagttcgttcactcaaagtacacagccatgatattgctgtcagtcataggcaagagtgtctgcttccccaagccctattaaaggacaatattgtcacattcaaagcttttcgccaacagtccagaccctagacgatatcttagcatttctgtttctcttgttaggaaagatgtgaaacgtactgtcaaaggcgtatgcaccatgtttgtcagttcttcctgttgttttagactataatgaaaagtgtattgagattttcagatgcatgctgtagagagggaatatttgtgacagtgggtgtcattaattgccaccatgttgctagctttgttttatccattacctttgcctcccatgcattcatctactctagatgccataacattccattcattagaacatcagtatggggctctgacacaaggaggtagaagaaggacacaaatatcaacactagtattatgccttactaaaatttgcagtgatccctcagcttatctgacgtgctctagttatcttgaaaatcttttagaaatattattcttttaatttataaaataagagaatgatgaaaattatgtcttaggttcctttccattttaaaatttggagatttattccccaacactgcataataaatgtgggcaaaactcgctattgtaagccttgaaatgctgcctgataatgagctcaatgcttgcttgtgaattctgcctagcactctcctcatgttctctttcttcagcctgtaataatcttatctattgtgctaccattagatagttatctattactcctctgaaaatagagtgatttggttccctaagagagctttgttctaaaaacatttttttttggatgtgactataggctataatgtcaccttaatctttctgtgagcctaataaggactgaaaaatgttcttggtgatgatatgattgtaggcttgtcagtttcttatttgtcatattctattaattctttcaaaaccttggccttacctctcctttgtccttgagtcatttgtacactgctagagtctatatgctgtccctctcaggcagagtcagattgctgctgttcatatccggcattcattaactccattcttgtgtaatctttcctcattgtgaaagctggatttataaagactgccagctttacagagttatcatgaagattaaacatgttagacccttagtaacaatgtccagcacacaaggcacaaaataaagcatagctctcattggtccagccatgtcttgaaggcctctgccctagaccagttctgtttccccctgtcacaataaaaaagctggataaggagtagtagaactgtacatgagcatcaccatttctcacgtgagacttttaaaattaaaattgattaaagtaaaagaatactaaacagttactttctctgtccacccaaccacgtatttgtgggaagtggatggcctacatacagcaagacatgacatttctttctgtcattgcagaagttctgttggcatgatgaccagacttctggatggcagtgacagctttagtgacagaggggctcttgttctttctttgttcctatatcttttaggagggaaaacttgttctgttttcttcatgggatgatgatttatgtagaaagatggaagaatccaccgactctagcttcactgttaaaacagattaacaaattagaaattacccctcctatatgggtgggcatgcctgcctgtaagtgccacagcaactgtagcagctttcttttctcccccactctctgctgtgtctcagatactgaatgtgtattcccttcttctgctcatccaacaattctttggtgcccttcctatgaagaagcaggaagtccagttgacaaatgtcctgtgtgaacacttctggccatacctgtgagccgctccagcgtgtccctgcaccacagtctccctgtgaatctcaagtaccccggactgtaaatgtgttgcttttaatcaccacatatgtctttctgtatttgacttgtgaaattagcattctataaaatgtccactcaaataatcgttcctcagtgcctaccctactaagtccaatttcttctgcctgacttttatagtccttgtaatatgaccccactctaagtatataattttctttcattattcagtgtctatttgaggaatgtcaatcatgtttttaccttgagattgcaaaggtatttggatgtataatcttcataaaagttctatggattaggttaatagaaacacacaaaaataaaaaaagcacatataatgtgctaaaatgccttccatagtttgaatatggagtaatgaagtaaaataaaattctctttattaattacccaatcttgtgtatactattataatagcagaaagttgactaagtgcatagttggaaatgttcaaagtactaagttaccatgaaagagatagtgattaagcacacacacacacacacacacacacacacacacacacacacacacacacgaactcatgcatgtgcacacagacacataccagtcaatgaggggagggtgccagagataacgccaaggcaagcagctactagataaaagttgaagtatgaaaaaaagcatgaatctatattcctcactccaaataatgtttttgaccataagccaagaccctgtatgtgtgtttaagctctataaacttttggaagaaaccaatgtgtttatttcattttatctctgtgtcattgaaaatggatttttttctcatataatacatcctgattatggttttctctacttctactcctctcagttcctcctcatctccctcccaatctggatctacccacttcctgtcccttattaaaaaacaaacaggcttctaaggggttataaaaactaagacataggaacagaaggaaacaaacaaaagagcccaagagaaggcacaagcaacaggtacagatgcagaggcccactcattttctgttggccatctactgctgggcatggtgtttgccctgaggagtaaattttcatttacaaatggttatcaaatggagatagctcctgggtcagggatgctggaatgtatcatttctttcatctctaggatcttttctgacttagacccaaagagaccttgtgcatgttgcctcagtctctgtgagttcatgtgtcgatcttgttagtttagagggccttgttttcttggtgctattgactacaagaaacagatctctcatatggaaacatctgatgtttcagaacagatacatgtctccccatacacagaagctctgtgatcatcagactttaagtccaaaatttatattccttggaaatcaaataaataaaaaccagagaagaaaattaccgataaatattttaagtattcgctttgcattataaagaggaattataactcaccataccaagagttagaacacaaaactctgagtttggtggcacacttttatattgcagcccttggaagtggaggtaagaagatcacaaacttaaagttatatttggttacattggaagttctaggcaagcttgggctacatagtgagatcctgactcacctaaattggggcaaatattaaagtaaatggagatatattgttctgtttttctccaaaaactttctagatttaaaggtttattttgtattttcagttcttagaaattaaaaatgttaccatttctttattcttatcatatcacaatgatcaccccaaataattcaatatggattcatttccttctcatgaatgttcttcaaatacaattgtaactttgacctttaaattttggtcaaaaaggaaggccaaagccttaagtttctgttttctgcatgccatattctcagttccttctacattacactttgtgattgattaggtacatgggtattttgatctggtgatgaaaatggaggacctaagatgatcccaagtgggagactcatggatggaacttgggaaattaagaaaggttggggtccaattttaaacataaatttcagatacctgtaggtgatgacaacaaacgagtccttttttatttaaaaattattttttgttttatgtaccaaccccagttccatttccctctccttttcccacctccccacttccctcccttcccaccccctatccactcctcatgggggtaaggcttcctttggggagtcaacaaagtcttacataccaagttgaggctggacccccctcccccccccccccgcccaccgcatcaagactgagcaaggtagataagcaaagggaatgggctccaaaaagccagctcatgcaccagggatagatcatggtgccactgtcagtgcccctcaacagatctgttaaccacattcagagggcctagttcagttctctgaaggttcccaagctgtcagtccagagtccatgagtcccacttgctcaggtcagctgtctctgtggttttctccatcatgctcttgactccccctcgttcatatgatccctcctccctcttttcagtcgaacttcaggagctcagcccagtgcttggctgtgggttactgcatctgtttccatcagtcactagatgtaggtcctatgatgacaattagggtagccactaatctgattaaaggggaagggcccaaatgaaaccctttccagacagaaatcttcaagctattctaaaatagaaaccagactgaagtaagcatcattttccttagtggagtacattccagcatatgctaaccttgtattgagtctctgatgtggtctttctaactccgagtaacttagagttccatggtatataaccaagaaactccagtctagttaatactgtccatcaaaagtgagtaaactgtggggtttacttcttggtaaccactaatgacagaactggctcagctgtcctttctgctgtccagcatcctgctcacagctgcatacacagtaggtttggagatgtagcactcccaactactgcatacccacttactcctatatcacctttttcaactttctctttagctcctcagttcaaagctgggatgttaatgttttttttttagattaaattctggttacaatattataagtaagttgttttatacatataggaaatggaagtattctgtattttgaactgttagtgatatatctaagccttgattgttgttaatgtttgctagagggtatttcttgcaaccaatagccattatgaccaaaaatccttggagtttatgataatgggatacacattatttttggcatgattttatggcaatattaaggtagtagtatattaaaatattgtttgcaaacaccttttcaaatacattattgtatttttattctttaacaatccttggattagttgcattttcaaaatttaaaaaaccagaaatcaagtcttagatgtctgtaattcaagtatcaagattttagtggatgtcattaggtctagcaactaacaagattgcataacttgaatacattagattaaaagtcagcacttggatagaaagatgtgcagctattttaaatttaaagtactgaggaaaacctggaaaatcttagagatatttcataaaaggtaaccaagagcagttattttttattcttcaaaatattttgtgttagagattcaacccaggaccttacaaagctaagtgcacagtctacctttgaacttcacccccagcctctacagttgccattttcaatgatgtaatgacaacattcccagagctaagcagcacaaatgatgcacttccattgagaagattaggcatacgctgttttgtgtagttagacaagtgagataaaaagaagcaggaattatcctgcctcatgtcagattgtcagcatcaaggaaagaaaggtggtttcaggtgtaacatgtggattcctagtgtatgaggacatggattcccagagtttaaggatatagatttccagggcataaggatatggattcccaggttatgaggatatggattcccagggtatgaggagatggattctcaggtctgaggatatggattcccattgtataagaatatggattcccagagtatgaggatatggattcccagtgtatgaggatatggattcccagtgtgtgaggagatggattcccagtgtgtgaggatatggattcccagtgtgtgaggatatggattcccagtgtatgagaatacagattcccagggtgtgaggatatggattcccagggtgtgaggatatggattcccagtgtatgagaatacagattcccagggtgtgaggatatggattcccagggtgtgaggatatgaattcccagggtgtgaggatatggattctcatgatatgataatcttacaaaatgaggagaatgagctgtgttacaatcctttcatctaggtacagtttactatcacttttaaacaatgttaaataataattctgaagattggccctatgtcaaatgttgaaatagtgggcttatagtctcctggggggtgcttagttaactgataatagcctgtgactgtgtctaaatatagagattacagcataaggaggaaaagtctattctggttctcaatattcctaatgctctgaccctttaataaagttttgcatgttgtggtgactcccaagcataaaattattttcattgctgcttcataactgaaactgtgctactgttatgaataatatgtgaatatctgatatgcaacccttgtgaaaaggccattagactccaaatgggtcatgacccacaggctgacagtcattgttctaggagaggcaaactggcatgttttgagcaatcctaatgaaataaccctatagcaaggaagtgaagtctccaggaactagccattgaggactgcaggactaccaacaactatatgagtgatcttggaatagaactgttctctaaatgcatttagaaatgtctgcactcttggttgagttttttactttaatgttatgaaagactgtaaagaagtaaaaactagctgttggggttgtcttgcatgaaaactcaaccctgttacatgctgcctgacttgagtgtctttggaaactctagtaacaagctgccataaccacctcagtccttcatcttgcatgtctgtaaagccagcactgtgtgggcacaggaaatgtagcttgctagcttgtgatatagcctggatccctgtcatagctgctgtgacttttaaggttcttagttgctgactctgggataatactccccagctcatgcacatttactagcaaagacatactacggacaacattctcagttcacactttctcctttaaactgaatttgaatttttataagcagcagctttactgtgggtagggttttgccctcacaggccctttctgattgtcccagggcaaagtgtcaggttcctctttaatggcaggactttcttcaacaatcaccctgttggaatcaaatctgttggttaagtttagccatgctaatcacatttcttaacctaactgcatttaaaaaaattctaaaacttttttcttaactttaaaaaccataatgtatgttgataatgttctaatcatcctttaactccttccagatatccccttctcccttcctacccaacttcatgtccattttcttccctctaaagcaaaaacaaataaaaaaatcaataagaaaacaaaaaaataagaagacaaaactaaacctacaaaactaaaataaaacccaatatatccatggagttggttttgtgttggccaagtattcctaggcatggcacctaccctgtagtgtggttgacatactcagtgtcttagggtttctaatcctgagaagagatactataaggaaagcatttaattggatggcttacagttcagagattcagtccattatcatcctgttgggacattgtggcatgcaggcagacatggttctagagaagtaactgagagttccacaccttgcacaggcaacaggaagtggtctgtatcacgacatggcttgagcatatataagatctaaaccctgcctccacagtgacacacttcctccaacaagaccacacacctatttcaacaaggcctcacctcctataataggaggctccctcaattttcttttgaatcaccacacccaatgacactccattgtagggaactgattttccctttaccagtaggtataaatttcgaacagcttcttggttaggagtggtaccttgtgtctaattctatttgatatctttattatctggttcctaatttggattctcataaaaacaatgagaataatcctgttaaagtctagatgttaggctgtcttgaaatttccttcatcaaacaactcagcctgttagcttcactaaaactttcaggagatgagcagaatgtagccagagcaccaccaccaccaccaccaccaccatcaccacatcaccaccaccatcaccaccaccaccaccatcaccaccaccaaccacaccatcaccatcaccaccacaccatcaccacccaccaccaccatcaccaccaccaccaccaccaccaccaccaccaccatcaccaccaccatcaccaccaccaacacgaccaccaccaccattaccaccactctcactaccacccatcacaatcaccaccatcattagcatcaccatcaagatcatcattagaatatgacaccaaagacttttaatctgatttctggtagagttcttgttctcctgggaaacatatgagttgggtctcccttatctacttttctgtcatcattatgatttcaattcccactagaaaggcctattttaggacttctctggtttacggatttttacattcttcctttaaataaacaccaaaggcccagagatttcatggtcgggcttatcacacttaaccccacttcttggtactgactttcttatctctgcaattgaaaccttgacaggaagtgatcaagggcaagaaggatttattttaatgaagtttcatggtggaggaggcatggtggttggggctctgagcacttagctgatcatatcactgtagcagatggaagcagggaactgaagccaggaagtcaccgtcaagcaaatgcttttatttatacaccttttttaggacttctgagacaattaagctattgtgttttgtatttttcttctttttgtttcttgctgtttatcttcatcattcactttctgatcttcaggactttttttcctttaaaaataccctgtgcctatattattttcttaaatcttaagtgaacattcttactttttaaataaaataagtgaacttcatgaactcatttgaaactttttttcaaactttttaaaaagtttgaaataattttggtttgaaatgttttattttgaaaaaagtgtttttaatcacttacgttttagctgcccccttacccccttgcttataagacagggtctctctacataacccagggtggcctctaactcctagtcagtttgtcttggattcctgaattgttggattacagaaagtttggcttaagtgtgtaaactcactaatcccttattttacattgtaatatgcaagtgaggaagaaagaattacaatatatttttttctctttttattattattattattattattattattattattatcattattattattaattcaagttagtgaacaggcttatttcacatgtaattcccctctccctctccctcccctcacccccattccttctcccccacctccaacctaccccccaccccatccacccaccactccccaggcagggtagggcccccaaccggggctccaccaagtctaccaaattttcctgtgctgggcctaggcccctccccatgtgtccagagacagagagcatcccttcaagtgggataggctctcaaagtcccccccacccaccagggcaaaacaccagtccacctccagaggctcccaggagtgcaggggcctccccattggcatccatgatcagggggctgaattagtcctgtactggcctcccaaagagcatctggggtcgatatgctttccctttttcaggccaactgtttctgtgggtttctccaaccaggtacagaccccttcgttcttcattcctccctctcttcaactaagttccagatttcagctcagtgtatttctgtggatgtctgtctctgcttccatcagccactggatgaggactctaggatagcatagagagtagtcatcaatctcattctaggggaagggtttctaggccatcctctcctccactgcccggactgtcagatcgtgtcatccttataggtctctggagatcttcctagttccagatctcttctcggacctatagtggctccctctgatatggtatctctcatcctgctctctctcctctattcttcccccaactcaatatatctgctcctccatttcttctcctctatcttcttgtgctcttattgtggcagcacccactcccctaccctcatgctctcaattagctcgggagttcatgccacttcccattcctggggtccatttatcccttagagtcattcatgatttctagtttctttggggaagaggattataggctggtaaacctttgctctatgtctaaaaatcatatatgagtgagtacataccatgtttgtctttttgtgattgggttacctcactcaggatggtttcttctagttccatccatttgcctgcgaatttcaagattccattgcatttttctgctgagtagtactccattgtataaatgtaccacattttctctttccattcttcagttgaggggcatctaggttgcttccaggttctggctattacaaacaatgctgctatgaacatggttgaacatatgtccttgttgtatggacatgcagtatttgggtatatacccaagagaggaatggctggatcttgaggtagactgattcccatttttctgagcaacagccatactgatttccaaagtggtcttacaagttcacactcccaccagcaatggaggagtgttccttctccgcaacctctccagcataggttgtcattggtatttttgattttagccattctgacaggtgtgaggtggtatctcagagttgttttgagttgcatttctctgatggccaaggattttgagcactttcttaagtgtctttcagccatttcagattcctctgttgaaaaatctctgtttagttctgcaccccactttttaatttcattgtatggtgttttggtggctagcttcttgagctccttgtatattttggaaatcagtcctctgtcagatgtggggctggtgaagatcttttcccattctgtgggtggtcattttgtcttactgactgtgtcctttgccttacagaagcttctcagtttcaggaggtcccatttattgattgcagacctcagtgtctgtgcttctggcatgatgttcaggaatcgttctcctgtgccaattttttcaagggttattcccactttctcttctagaagtgtggctggatttatggagagatctttgatccatttgcacttaagtttcgtgcatgatgacaggtatggatcaatctgcaattttctgcatgcccgaatccaattgtgccagcaccatttgttgaagatgctatcttttttccattgtatggatttagcacctttgtcaaaaataaggtgtttgtaggtgcgtgggttaatatctgggtcttcaattcgattccattggtctatctgtctattcttgtgccaataccaagctgttttcagaactatggctctatagtagagcttgaagtcagggatggtgatgcctccagaagatcttttattgtaaagagttgttttggctatcctgggttttttatttttccatataaagttgagtattgttctttcaatgtctgtgaaaaactgtgttgggattttgatggggattgcgttgaatctgtagattgcttttggtaggattgccatttttactatgttaattctgcctatccaagagcatgggagatctttccactttctggtatcttctttaatttctttctttaaagtctcaaagttcttattgtacaggtctttcacttttttgattagtgttacccccagatatttatgttgcttgtggatattgtgaaaggtgatgtttccctgatttctttctcattgggtttatcatctgtatacagtagggctacagatttttttgagttaattttgtatcctgctaccttgctgaaagtgtttatcagctgtaggagtttcctggtagagtttttcgggtcacttatgtagactatcatgtcatctgcaaatagtgaaagtttgacttcgtcctttccaatttgtatccctttgaacccctgttcttgtcttattgctctagctagaacttcaagtacaatattgaagaggtatggagagagtggacatccttgtcttgttcctgattttagaggaaatgctttgagtttctctccatttagtttgatgttggctattggtttggtgtatatttcgtttatcatgtttagatatgttcctgttattcctgttctctccaagatctttatcatgaagggatgttggattttgtcaaaggctttttcagcatctagtgagatgatcatgtggtttttctttttcagtttgtttatatggtggattacattgatggtttttcgtatgttgaaccatccttgcatccctgggatgaagcctacttgatcgtggtggatgatttttctgatatgttcttggattcaattagccaatattttattgagtattttagcatcgatgttcatgagggatatcggtctgtagttctctttcttagtcttatctttgtgtggcttgggtatcaaagtgattgtagccttgtagaaagagtttggcaatctcccatctgcttctattgtgaggaacagttgaatttctagtagaattctgcagtgaagccatctggccctgggctttttttgtttgggaggcttttgatgactgcttctatttcattaggggtaatgggtcgatttaaactgtttatctgatcttgatttaattttggtaagtgatatttatccaggaaactgtccatttccattagattttccaattttgtggagtacagattttcaaagtatgacctaaagattctctggatttccacagtgtccgttgttatatccccctttttgtttctgattttgttaattagcgtgctctctctctgccttttggttagtttggctagaggtttgtctatcttgttgatcttctcaaagaaccaactctttgtttcattgattctttgtaatgttttcctagtttctactttattgacttcagctctcaggttgattatttcctggcgtctactcctccttggtgtgtttccttctttttgctctagtgctttcagttgttctgtcagtcctctaatgtgacttttctctagtttcttcatgtgggcacttagtgctatgaacttccctcttagcactgctttcagagtgtcccataagtttggatatgttgtgtctgcattctcattagattctaggaagtctttaatttgtttttttatttattcctcaacccaggaatggtgcaattgggtgttattcattttccaaaatttgcaggtttactgccatttgtattgttgctgaattctagctttaatgcatggtggtctgataagatacagggggttatttcaattcttttgtaactatggaggtttgctttgttgcctactatgtggtcaattttagagaaggtgccatgtggtgctgagaagaaggtatattcttttgagtttggatggaatgctctatagatatccgttaaccccagttgggtcataacttctttcagatcctttgtttctttgttaagtttctgtctggtggtcctgtctagtggcgtaaggggggtgttgaagtctcctactataagtgtgtgtggttttatgtgtggtttgagctttagtaatgtttctttcacaaatgtgggtgccttcgtatttggagcatagatgttcaggattgagatttcatcttgatggacttttcctgtgatgagtatgaaatgcccttcttcatctcttttgattgattttagtttaaagtccaatttgttagatattaggattgctacaccagcttgtttcttgagcccatttgattggaaaatcttttcccatccttttactcgcctgtctttgaagttgaggtgtgtttcttgtaaaaagcagaaggatggattctgtcttcgtatccattctgttagcctatatctttttatgggtaagttaagaccattgatttttagggatattaatgtccattattcgttgcttcttgtttgttttggatttattgttggtggtgtcattgtgtgtggattttgccctcctgcttctttttgtgtttggcaaaattagattatctattgcctgtgtttttgtgcatgtagttatgttccttgggttggagttttccttccagaaccttctgtagtgctggatttgtggatatgtattgtttaaatctgtttttgtcatggaatatcttgttttctccatctatatgattgaaagttttgctgggtacagtagtctgggttgacatccatgctcccttagtgcttgtagggtatctatccaagaccttctggctttcagagtttccattgagaagtcgggtgtgattctaattggtttgcctttatatgttacttggcctttttcctttgtagctcttaatattttctctttattctgtagatttggagttttgattattatgtgtcagggggacttctttttgtggtccagtctgtttggtgtcctataagcttcttgtactttcataggcatatctttctgtaggttggggaagttttcttctatgattttgttgaatatgttttctgtacctttgagcagtgtttcttcaccttcttctacacctattattcttaggtttggtctttttacggtgtcccatatttcctggatattttgtgttagggatttgttggacttgaggttttctttggttgatgaatgtatatcctctagcgagtcttcaatagctgagattctctcttctgtctctttgattctattagttatactcatgtctttagatcctgatcgtttatccagtctttccatttccagcatcgcctcattctgtgttttctttattgtgtctaattcaactttcatgctttgaactgtttcaagagcttccttcacttgtttggttgttttatcttgggtttctttagcttctttaagagatttgtttatttcttgaattttttggtttgtcttttcctccatttcgtgtaattttttgcttgctttttcttctatttctttaagggattttcttgtttcctctttgaaggtctctatcatcttgctgagataatttttgaggtccatctcttcttcatgcactatgttgggcttttcaggtcttgctggagtggagtccctagattctggtggtgtcatattggtttttctgttgttgagcgagttcttattctgtctttttcccatatctttttccagtgagtgcaggtaagatctctctatctcctcttgttacgctgtagtgtgtgtgggccaggaattcaatgcccgaagctctggatggtcttgcctctctcctcactctgaaggagttaggcctccataggatcgggtgtgtgggggcgggacaggaagtaagagtggggtgtttccaggctctgggggttcctcactgcctgggcaggtctaccccaggcaggagcaggcctggggagattgggatggatggggctttgatagggagttgggtaagagcggtggatcactcacctcctggcggattggtcgactggaatggaaggaagagtggcctatacccagattcagggagttcctccctgcctgggcatgtctatttcaagcagggacaagcctggggggatctgggtgaatggcactttggacaggagttgggtaatagcagggggtcactcatctggtctgtgatgagtctgcggaaagggaaggaagagtggcctgtacccagattcagggagctcctccctgcctgggcgtgtctgtttcaagcagggacaagcctggagggatctggtgaatggcgcttaggacaggagttgggtaaaagcagggggtcattcacttggtctgtgatgagtctctacacatatatttttaatttgaaaatattaacgttacttctccccttgataaccatagtttctagctatatcctatttctgttagtaacaaaagcattgaactgcaaggagcttatttttaaaaacatttcatggtaaaatagaacacagaacagaatgaaaacatgttgttttgcaaggtgataacacaattcacaactgtgtgcttcccccataagaccaagtgatactcaactgcatctgtaaggctttacttatttttttagagaaaaaccatactacatatgacaaaaattgtgacaggtcttcttggtgggtgtagaaatgttggttatgttaccatctggttgttcctctgtgttcaaaatggttgcaatcaaaacatactaatgaaagagaactgagcacagagctatgtaacattttccagtgtttgagatagtatccgaggacagttgctttttaagataaaaaggaaattggaagaaggggaaaaagaaggatgatagacattatttatctttttagttgactgaattgaagtattttgcaggtgtttcctagtctcagtctgatttgcttaacttcatctgattagtggacagtcttttaatatgtaataattggtgggaagaaaattgccatgcagtgtacctccaactttacagtgcatcagaatctccctcaaggtagttggggtcactacagtgttcctacttcagtaggtccgaggtacacacgaaggatttccatttttagtaagttcccacacagtctcccacttggacgctgctgcagacggtcttcatgcacaaaagatgcttccagcaggtgtttgaggcccactgctgcagcaaatgcaggttagagaaaatgcctttctaaagtgttcagaaaattacccttgtctgatggagctgccttcttagaggtggctggaagtcttcccttccccccactacagcaatctaagggcaggtgactgccaaactctggacctcacctagagaaaggatagctctatgctgtgtggtttacagcctagagatgtttccagccttatcacgccctccctgtcacctacagagaagcctgagactgttcctcttttctgttttccacactcagttttgggtatttgatgatgaacacaccctcaaccaagctctggcatctacagccccatacccagctttgcttctagggaaccctggcctagaagcaaacatgatgacaacatgaagctttttgcttctaaggattgtcttaaggtcattaagtattctctggtggtgttgtgggttctactggaagctgttcaaaagttggaagctctttggtgggttgtattttccctgtcattaaagtttgaaaggcagagatatggacttagcatgaaaatatttttaaagaaattatgttttgtttttctataaacttttaaaattcaaattgattgaaaacaagaaaaatttgaatttggtcaacacacacacacacacacacacacacacacacacacacacacacacacgttaatgaagtcagaataatgaatgtgttaaccactaaaagtctgtcagtctatggtgggagggatgctcagttggaaatatgttactagtcagtttttcaggaggctgagttctcattagttctttcactttgtagcttgattggtgggccttctaagaaggactacctgctaccatccaaagggaacataattcctggattaaatgtcatgttttcaaattgaaaattattattttttattatttttctcaagagattattttattagtttaaattagaaacaaggctgcttcacatgtcaatcccttatccctctccctcccctccccacaacccccccccacagcccctcacctcatctcccctctgctctccagggagggtaaggccctccatggtggttcctcaaagtctgtcatatcatactgggcagggcctaggccctcccctgtgggtccaggctgacagagcatccctccatgtgggatgggcttccaaagtcccttcttacaccaggggtaaatattgatccactaccaggggccccatagaatgccgaggcctcctcattgacatccacgttcaggggtctggatcagtcccgtgctggcctcccagatataagtctgaggtccatgcgctcccccttgttaactgtttctgtgggtttcaccagcctggtcctgacctctttgctcttcactcctccctctctgcaattgggttccagagttcagttcagtgtttagctgtgggtgtctgcctatgtttccatcagccattggatgaaggctctaggatggcatataagtcagtcatcagtctcattataggggaagggcatttagggtagcctctccaccattgcctagattgtcagttggggttattcttgtagatctctggaaatctccctagtgccagatctctcctcaaacctataatggctccctctgttatggtatctctcatcctgctctcttctattattcccctgactcaacctttctgctcctccatttcctctcccctcctctcctcccccctcttattctccaagctccctcttctctaccttcatgctcccaattagctcatgagatcctgctccttcccattctccagggactcttagagtcctttttgtttcctagttcctttggtgatgaggattgtaggctgcaatcctttgctctatgtctaaaattcataaatgaatgtttgtctttttgtgactgggttacctcactcaggatggtttcttctagttccatccatttgcctgtgaatttcaagattccattgcttttttccgctgagtagtactccattgtataaatgtaccacattttctctttccattcttcagttgaggggcatctaggttgcttccaggttctggctattacaaacaacgttgttatgaacatagttgaacatatgtccttgttgtatgaatctgcattccttgggtatatgcccaagagaggaattactggatcttgaggtagactgaatcccattttcctgaggaaccgccatactgatttccaaagtggttttacaagtttgcacttccaccagcaatggaggagtgttcctttttctccatatcctctccaatatagactgtcattggtgtttttgattttagccattctggccagtgtaagatggtagctcagagttgttttgatttgcatttccctgatggctaaagattttgagcactttctcaagtgtcttcatttagagcctttgcaatccatgtgctgccaccaagtgctgtttctcttcgttttgaatgagaaatcacttgaaaagctttgcagtaaatgagactattgattggatggttgctcagatcaaagttgaccttgcaatttttccctatagctggtcaaggaataagttgcttagcagtgatagttccagtttcttcttagaagtaggtgagtggagcaatgctcagaaagcccacctacatgtctctcggcatggattctgtattgcctttctgttgctgtgataaaacaccatgaccaaaagcaacttacagaagaaagaattgattttatcctgtggtttcagaggaagaaaggtgtatcatggtagcaagtgtcaggcattgtggctggggcaagaagctgcacactcaccttcaaccacaagtattaaaggagggtgaagctatgaactctcaaagtcttcctctatcaagactgcacctcctaaatctctccaaatagcaccaccaagtaccgtgtttacataactggatataaaattctaaagggcagtatggttggcaaatctcatttaaaagcaccatggttccaactcattctttccttgtaaaacaagtatgccaccaggaagaatcccttcccaatatgttctttggatcacacattctggcagagaatatcccttttccatttgacctttaaagactcccagtacacaaactatcagtcattcagcaattttctgatgtgagataaatacaaaatgttattaatggaggctgtggataaaatgatgcaacaagattaaaacaaacaaatagaaatcagaagtcaatcaaagcaaaaaattaaaaataaaacagtatcttctcttaaaaacttttaagtggagccaaccccaacactcctcccccatcattgcctggggcgggtgggagagctggccctgagtcataagagagggagagctgtccctgctcctcatctgctgcatcactctggagagtgacccctacaccacacctgggcaacatagcaaagctggccttggaggtataggtgtgcgagaaccaaccctgaagatgggaaagtgggagaactggtccaccccttgctcatatctgttaggagtgaactagccagggcaatgcaggagagctcaccctgctggtggggacaagggatagctggtgggttagccaaccctgaaactgccaggtccaggaccagggttattaattggtccatcccaacatccaccccatctgtgatctgctggagcacatgaagggaccagtcacacagaccaaaagctgcaagatctccacaacacagggcagcaacagtatacctaagaggtgttccagtgagggcccagcatcgatagtgtggcagaaaccagaggccttgaaccagaccaatcattctttgtgacaaacacttgcaagtaaagacatatggacaaaagggtttactgagtgattcattgtgtcacactacagctcccatgatgagattgatttttctttcatttttttccttttaaattttattgggggggaggttgcaagggcagtgggtgtatatgaaggcatggggaagtgaatggggtggagatgcatgatgttaaagacacaaagaataaagaaaaatgaaagttaaacaacttgtaagtggaaccaatgattgctcaattttattctttcattaattaccatttctaaaaagaacacttatcctttcagtatcccggggataataatttcatcatatactttcctaacaaattatgacagaggcacagttggtgttttgattgtaccagtgcatcaaatattaagataagtgaggaaacagtttcccctagattgtaactaacatagaaaaaaaacctggaactaaatctcactagtcattttggaggtaaaataagttgtaatacatttgtacacatgactcattgccaggaatattttctcttttggtcacaattttgaaacacaaaaatattcataaatttaatccttttattagtatgcaagcaaaaatgtggaaggtctagatagtggaagaatgtttctatatagaattctaaagagctctaattctggaggtgtggaataaatcaggacaaattaaccagtgtattctcctgcagttaaagttcagtgctctcggtaagaaaattcagttcacactgaggtaagtgggtagataagtgttggaatggtgagatggtttgtttggtatgggtgaatttgtgtttatattcataaggtctgaagcaccaggatgtgtgttttatttcactttccccattgaatcaattatgttcataaacttcatgctgggtagataaccgtgacttcattttggaattctttaattttgtttatgctttgagttagttcagtctatgtctgtatgatcccaggtgctgggcaaaacattttggtggctgggttttatgaccagggagcttcttcaccatatggtgatgaagaagcagagaaaaagcttatattcaggatatttgcttttcctttcttattccatctagactcccagcctaggaaatgatgcgaccctcatttagggtgagtctcactactctctagttggtcttctctggaattccatcacagacacacccaaaggtgtgctttacaatctcctaggcacttttccatacaatcatgttctccatcctcttagggttatgctcctgctcatagttgacttatctttcttcccattggtttcctggtacctagtagttatagccagactggttcggattcccccctttgcatcggaaagcagatatatctgcagtttccagactgagtcttgaggcagcggcactgcatcaagtccacacaggaaccatcacgatgaaagtttgaaagtttctagtgaagcaacacaacgtctgttggacatgtcacaaaatctgagttgctactgtatttcagcaaataatgctgtatttcagcaaagctgagtttgagagaggcagtggctatgattaaaagttactacctttaaaatcaaaacgtgacaggaaatgaagatgactatgtctcatttaataacacaagccttgaggagttgtgcgatacccaccaacaacacaaatcccatttagttgtttgtagttattaagaacaagtgaaaaaaatatgtgtttctttcaattcaatagtatttttccaaagcactctaagtggttaggcttgaagtccttattaagtgtctggatttactcacttagctagtggctctgttaggcattcatttggcctcaggtgatacaggaaaggttccccttgaattgagtatgtggagatagaaggctgggaaagtaaatacaatataaattaaatatgttccttagtgtcttggataatttcttgtcaacttgagacaagtcatttctgaagagggagtctcaattgagaaagtacctccaccagattaacatgtgcacttgcctatacagcttgttcttaattagcgactgatgggggaagccttagctcattgtgggcagtgtcatccacagatagatggttctgtgtggtgtgagaaagcgataagcaagccatgaggagaaagactgtataagtagcactcctccatggcttctgcttcagttcctaacttcagttcctgtctggagttcctcaatggactgtggtccaggatatgtaagtcaaataaatcctttactccccaagttatttttggtcacgccattttatcacagtaatagaagtttttgctaagacatttagggtccatgagaagatagaaaagtcctctacctagaaaagaaagtgtatcattctgatctatctatctatctatctatctatctatctatctatctatctatctatcatctatctatcatcaatcaatcaatcaatcaatcaatcaatcaatctatctatctatctaactatttttgtttttcaagacaggatttctctgtgtatctttgtagaccaggctggcctggaactcacagagatctgcctgcctctgcctcccagcctgacttctgctttttaacaattagatgtcttttgattttgccatctgacaaaaggcccccctttgaggaaacgagacaatggggtgggggttaaaggagaagaaaactatgtttgacaaacatataggttaaatatcatattagtgctaatataaatttcaaagaaattgttatggaattcagagaagcaggtgtatctgggtggactggctagaattcagaacatattgtgctaagctataagatttggaagtgactttgcagttgttctaatgctaactcttagactgtcatatttcacagagcaaatgaacatacctagaaaatgaagatgctaggtctgcaactagaccacacctgcccattggttctttgggagcatctctatatgtctttgggatgagactgctggtcaggcatgtaggcctttgctctgcctgcctgggatggcacaatcaggtgctgaagtcttatatcacacacctagggcaaagtgtacatgaagaccagtctgactgctaggtttgcagtcttaggtttgtattaactaagtggaagatttccctcccccttagagccagtttgctgttcttttcttacaatagggcacatggctaaagggtggatatatctgggtattatgttctaaggtcatgacctgagagtgatggtattgttgtcaattgcaggtaatatattataagaaccccccaagtgctttggaaaaagaatttcatctgagagaaggggaaagagacaaggtctcctgagaaaattgggacatgggggaggggagagggagctaggataatgagaaggggagaagaggagaggtgaggagtacaggagggaacaactgctatcctgagaagcctgttgaccatttacatctacacttggagcggtgaggagggtgttaggactctcacctgagtatagaggcactccctaccactggctagacataactgggacttaattgatgtgacttctgggaggtgttagagtatacaggttgggagaaaactggtggtggtggtatggggggcttcatctatgtggcaatggggaagccctcatccctactaggtaaaggctttccaggtttggcagttttagggaggtgtactcacagcttcatcagcagctcctcacctatactttgtaaggaataaagtcattgctttcccagagtgaactttggcctaatcctaatttggtttaggagtagatattatttacatctctacccggcaaggaattttaacaatacatacacacacaccacacctccccccatcacatcatatataccatatatcacataattcgtggatctttcttccatctaaaagggaacaatgactatgtgagttgccgcatttgaaactgcctttcttgcacccagattcttttctatttatatgctcgaagcagctttgtctcatctacctgagccaggtgaggcagaagggctagtagaaaatacatcaacatgaattctacaaacctgctgggactatgaattctcagggacatctggaaagtgtgttagcagaatttaaagaagtgtatctaccccagaaatttgatgtctgtggcttctaaaatagatactacaagatggtgagagaagttttggaataaaagagagaaaacacagacaagacataaaaggtacagaagaaattttgatcagagaaaagagatggttaaaaaacaagcaagaggaagatcatggagagagatgcacacttacattagaagataaaatgaccccatagctaatatttactagcaattgagaaattatcccatagtggatggacaggacttcaatgtctaggtcaggaggtctgtcctttggtttttcactcagctcaccaagctagctgattcctagaattttagcagagttaggataagccatgagtcacaatgtttacggtaactacttgtttttaactataaacacacattcaccaaatcagaatttattctagtgtagttgggtgatcagtcccagccttgtgactttgaaggggcagcctatcatattactagctacatttgttcctataaagaaaattcccttaggaacaagaatatcttattacatcagatggtctataaagaaatgtgttgtgtctttcatggtcccttggtgactctatattcaagtagtcttttatctactcttgactgacatagttcacttttgggtgaaattagaccatgacatcattgctgaatatttctccaggaacttctaaatcattaggctatttgtcttatgatttggggaatcttccatgtacatatacatacacatcctatttgtaatcttttgctcttattgtatgatctataattgtagctgagagctgtctgatatgaccacagagaagtgaaccttatatcacagcccattgaacaaatcctcagatagctaaattctaggcttctcctttttatttttgaaagaaatacaaactactatttgattaatttgccattagacaaaaatggctgctagatcttttgattccacacttgaaagcattacctagaatcagtttctacagtgcccctgatcctggctatcacatctttctttaaaaatagaaatgaaaaatctgtcttgtagaatttgagttacactaatatgtggaaaataataactcatcacacctcctgaaacatagtggatatctagttctagcttcctgttcatgcttggattctgctggagctgactcacttgttcacattaagaacccatgctctacccttttttcactctttcgaataagggtatgccattctacctttttgtgagctgtttggctttctgtgtgcactctattgtgctagtggattgagtttaaaaatggtattttttgcttcctacccttgtagacctgagatatagattagtatataagtactccattaattgttctaggcccacaaaacattatacaaaatttattataatgcaacatagagtcaaatgcaagtgctatgataacatttttatagtatgatttgggactgtcagattgtattattccagaatacttacaggtaagtgaaaattcagagtcacttaaaataccttttcacagacaaaggagaaatcatgtctgggtaagaagggtaggaaatggcttatccaaggttaaacacatcaacaagggcaaattaggattattctgcacaataagatgtttttggataaaaagacaagaacatttagctaatgaaatttctgtaaaacttatatatcttatggaccatttggtttgggaatttttgttttaaataattagttttattctattccaatacttaaaggaaggtcaagataacattttaccaatttaatccaatggatgaatttaggtacattttaatgggggaatacacaaaaaaagatcaagcacatatctatctatctatctatctatctatctatctattatctatctatctatctatcgtttttttttcgagactttagccatctggttttcttcttaaaagttttttttcattatagaaacactctctgcatagccacagaacaaatgtataaagaaacaccctacaagcaaaaaattataatgtttttccatgaaaaacactgctaagaagatagaatttgataaaataggatttggtttaagaaaattatttccttggtaggaaacggaagtgaagattttgactggattagaacatgtgtctcctagtggatgcttgggctgaatctgtaatgttgctgcacccctagaggtgctcagaatacagactcagctgtcaccatgtcatttcaggtcagcactctagttgtcgctttcaccttttaaaaatttttctccatatctttattgatatgtttttgtttattctttgacaatttcaaataaggtattttcatataatgcattttcttcatatttacctcattatcctcttttattccccttcactcccactgattgaacccctcatattcaacaacattcttttttttctgtttctgtttttttcctttttttattagaaagaaaattattttacatgtcaatcccaggtccctctccctcccctcctcctctgctccccacccccactaatgccctatctgtcccataccctttctgctccccagggaggttgaggccttctagagggggtcttcaaagtctgtcatatcctttgggatagggcctaggccaacccccttgtgtctaggctcagggagtatccctccatgtgggatgggctcctaaagtccattcctatggtggcaataagtactgatccactacaaggccccatagatttctgaggtctactcactgacacccacattcagggggtctgaattagttccatgctggtttcccagctatcagtctggggaccaagagtttttccttgttcaggtcagctgtttctgtgagtttcaccagcctggtatggacccctttgctaatcagtcctcctcctctgcatctggatttcagttcagatcaagatttagttgtctagcattatgcaagtgaatgaaaatcagacaatttagaaaagctcaattgcatgtctcaagcgtagttggggacacgtaagccatgggttctcagtaagttgtatgtagacgatacccatgaatgacccgtgatgacctagttaaggtcaccaggctgaatgctttcttgagaaagaccttcatggtgaatactaagaccttttcttatggagtgtgcacactttgttcccctcaaatgaaactcaagtgaaagcatggtcctttccaataagcttattattttcatcagaggactgtggaactgctttcaaatctcacacctgaaacattctccaacagcttgttaaagtttcatgagctcatctgtcatcttttgttaacagcttcctgcatctccctgtcccccttcccccatgaatgttctatgtccacacaactcttccagtatttaaaaaatttttagggaagggaggtggcttcaagcctgagttgggccaaattccacagccggcccacacacattgcttcaagtctccagtaattggctcagagaggtcaaagccacatgtttgcaaattatagctaggccttttatcaaagacgtggattctcatcacaggcgtaaatccttcattgtgcatgtctaacgttcatggaaaagtaaagcctttgggttttcagactctgagatttgattttgtcagctgttgaaggttcaaaatgatgatatctccaggagcattaaaaataatagaaaatagaagaaaaccacacagactcattgtaatttctcataatgatgtgggcgttgaataacttgaatgcgatgcttaccattctgggattagagaagcagaaatagtcaatgtcaccataacctcaagctatttaccacctccagttaagaatgaacaaaacagaatagattgccctgtttaaaatgaccatgatcaacccaccaatcctgtcttatctgagtaaggaatttcatagtttgaaactcatttatgaaagcatgattttggtttttttcctcttacctccaagcatagtttttccaacgttttgatgacaaaattgagtctggaagaggaatgtattttcttgctcagggctttacatcaaagagcaaaaactagaactaaaagtttgagaaaattaaccaagttttagtctagagtacagtccagcacacagaattgttgacagtgttctaatccaggcaaacctggccctgccgctttgggacctggcagaatgtctatgcatggatgccaccccctggcaggtacaaagttccctttaagaggcaagctgtgcctactttctctttctgccatttctctaaggatgcagctctctctcttctctctctctctctccctccctctccccactctcctttcccttactccattcctttcctccaataaaatttccacataagttacctgtgcaggtttctgtctgtacctcacctgacatttgtccctcatctgtcatgggatcaccaaaggtcctcttcacgatgtattcataacagatgccattaaagatggcatcattcagtttgatgtcaaagtctagggtacttactacagtcgatcccttctgctggcatgaatactgaatcttcttagctctttgtgcaatgttctttctgtctggattaggcctatgtgatgtctgtcctttgtgtgcacagaatgccactgatggttctttctgcttagtggagataatatgtttagcatgctagttaaagaatgagagcatgttgtatgattggaaggaaaggtatggactttctttatttagactttggttttgcttttggggttcttgcagctttcacacactgagaaaatgatatcatttaaactgaattcctctaatttcatttttcctttgtagaaatggaaatgaaggcatctattgtataggtctttgggcatattaagtcaataaagattaaaatatctagccaattgtctgccacacgatactactaatgttcttagtataaatgataacaaacacctgtggcatattgaaactatcgttcagggagcaaagaacttaaagttgtgtgataatccatctttccccagtcatttatttgattaactttctaggaatgtgcaatgctatcatagacaaacctaaaggagtgttttactaatgtcctaggcttttatcaagccaatcaagttgacaacaaaatattattcatcacaaggctaccatgtgtcaactagatatgagggaatgccactttaaacaataatattgttcctctgggccatgttttatgttcatgtcatatgtcaaaatgcatttaagcaatttctgaaagtctcccaatctcagaagcccaaaattcaaagactgctcttaggttgaaggcaatctcataactatagctgttgtaaaataataaataaaatatacttattgcaaacaactgcccagaatagccattctcattacaaagaggaaaaaagactaacaatgaaaggacaaaccatgacaagactgaaacccagcagaagaaataccaaactccaaatctatcatctggggctcttgacagaatcatctggactccaatagggttgagtaatcctgtccttttagtactattagctttagcagtcatggtctcattcttggtctgattccactttgtttctctagctttcttctaatatctttgagtgcccaatgtacagatttcacattcaccacttacttaatatgtggacatctcaggagcttcatgtaggaatctcacacttgaatatattgcttggtcttaaaggatttttgaaatcatagcaagagcaccctcaccttttgactattgaataaaacatgtctgcaaaaatcagtgccatgtggataacacaaagttattttgctagtttgatacagtctgatccccttggctcccaactatagtaaccactgtacttctatgaagctgagtctgggaaaacacttctctaagtgtctttgttcaagcaggacattctggtgtctttgtgtccttgggtactctcatttcaaataaattcaaatttttataattttgaccatttgataggtggaatattgctctcaaaaccactttcctattatttagtgagaagtgtgagattcctatttaattgctttaatatctttaacaatttcagcttctttgttaacattcaccctgtttgaaactttaaccagttcaatctcctattcttcccaaaatatacatttattgtatctttcttctccttttctctataaagagccgtcaatagtaatcatactacaatctaggagttatactgtcttgacattttctctgccaaaaatatgtaatccattactttcaaattcagctttactcaaatttgtgacttttttttcaaggaaggcaagatggcaggaggccccttggtgatgggaacatgtggctgggactcttcacctctaaacattatagtgaaacagaaagaagagaaagggctcatacttctcgattaaggtaaatccttaaacatttgactattgttttgagaagtggttgccgtgctatcattaatgtgtgtgttaagtttagtttactaaaagccagattagaaaggataattcagacacatatagtttatgtagaaagaatgccccaaaagaccagtcacagttgcagagacgctggaagaagtgttttcagatggagacttagtttcagcttcatcccccaaaagaactctgatacagaatacatttctatattcaacagtatatagttatcgactacatgctactgtaagtgtatgcagtgatggatgatggtgtcataagtacaatgcacatgcaacattttgagcatatagagaaaacaaatccaatagtagtgggtcagacttctggagcctcagatgtgtgactaggatatgaagaatcctgagtagagcaccaacggtgctacacaacaggcagaataaatctcttcaggatatcttctatgacttatttctgtgccccacacagtttaaagactttacaaatgtgttagacacaaataagtaatttagtgatatgtgaaagactttaaaattgtgtattaaacccattttttcattagttaaaaacaatacccccaaagttaactatttacaagagctattctcgtgaaacccgttcctaagtattctaccaggtccttgtatatctttaggaaaatgtttccacaaaactaaaaatctcttgtctccttttgagaaaaccaatgctttattaattagagctcgttgtcttcttcactgagttctatcttcttatgacatcatcagatgctgtgtgatgcaatgcttctcaatatgctcactgtgacttaacactcatcatagaagagacaagagtaaaaagttatgagtaggatggccaacacacacacacacacacacacacacacacacacacacactacagacagaaagatagacacaaggacttaatgtacacatttaaagagtagtctctgatgctgtatgtgctgtataaggaggaagtgattaatttttgccactttctatacaatcttctacagtccttcaatagtagtttgtgttttgcagagagatctgttgtttcttttactaatccttagatgatgtgagatgtccttctgtttgctgcatatgtgtgttgcttttattggttgataataaagctgatttggccaatggccaggcagaatagagccaggtgggaaatccaaacaaagacatggagagaaagtagacagagtcagggagacgtcatatagctaccagagaagcaagatgtgaggtaacaacgtatttgtatgtattggattatctttcataatccctacccctttacatatttccagaagccacagcaattaagaatttgacagagatttatacataattaggtatttgtatggtaaatgaaaacaccaatgagcaatatgtgcccaaagttagtccttttttttttttaaatctcaaatgtatgaaaagatattgttactgttaatggaaagatccttggatcttagtggcctaatgccattaaggattttactcatttcaactaacaaggagacattaactctacatagtcattcatggaccaaggactatgaaacatcttgtgttttgtcttacatggtcatctaagtatagatgaccaactgacagctgaaaaatacaaattgatagaaaattccatggaagtgttatgaagataaagcctaaatagagcacatagatcttttgctcacaattctttggcccaaaactcatctatatggccataatgtatcatgaaaatggacttaggaacatgaaaattattgtgaccccaaaaagataaagaaatgacttggctgatcaaatagtctgcttataggccacaaatttcaaagacagcgttgtgcagatgtaggtttgtaggggaagctgtagccacgccttcttaggggctggctacaagagtacctgagggcttgtgagggcgtggtcagagtgagtagggggactgcattttcggtttcagtctctctttgcttcttgctgtacagactaccaccggctggctggttcgctctgtaagtaaggcttttccctattaaatacccttatatttctacctgactccgtactggtaatttcttactatatctggtgtcagaagcgggatattggaaacccacaccccatttgggacaggctgtgggttccatcgggcccgccgcctaggcccggaaagcacccactctccacaggcgttgccggctagcagctgacccacggcagctgtgctgctcagtcatccacccagtttctagctgcctagaggtgagtaagtttcggctttcagcagaggcttccccttgcggcagaacgggaaagccaaagctgaaaagccgtatactctctaagataagcgcagccgcttttgtgacctctctccactgctgaccgactgctgccaaacgcctcggaataactgaaggcctgtgctacctgctggtcaaatatatttactgcatctggagtagaaatcaggtaaaatcatggcagaatatttatcatttgctgaaattggtaatgtttttgcttattacgtgaattcactgtttgaggaggatgctaatttgccaattattggcctatatgctgtcatggcagtcagcttgctggtacaaatagtattactagccagaggactcaggaacagggacagaaataacctcaccacctgcttgcaggaaataacagctttacgcaatgaggttttggaaaacagattaggtcagaccacaattgtgcagcaagtggaacagaaattggatgataagcttggctctgtgtccaatacactaaagacagagctgtctgatgagatacagcgtatttatgataagataaacacagagagatcctccatgtctgaggccttagaggctaggctgtcagaagaccatgaccagctaaagaatatctgtagccagctagaaactcagataggcaatgttactcatcaactagatgcaacggtgcaaaatacccagcatagggttgaagaattggacaatgccattcaatcagtcattgaagcatccaaggtagcagatcagaagtttgagtctagatttgaatgtttggaagataatttacagtacagggctgacagattacataggtccatacggtcgattgctgaggactcaaaatcagcaaatcatgacctggaatctagactccaatacctagaaggcagtttccatgccatccagatgctgtctaaggatgatcgtatgaaagacctagaaaaacgtgtagatgagcagttagagcaatttacagattcactaacatgcttagaatcttttatgattaaggagattgaaacttttcaaaaggatatcattgctaggcttaaagatcagtgggatgcctcagaagcagaatcactccaatcccaggcacctactccacccaggtatcgtgactattcttctaaggttgttactcgtacaccattagtgtacccagctaccatggtagaaaagccagcttctaagaaacaccctcatggacgaatggtttatgaatggcaacctatacagccgaaggatcttaagaatattaaagaatcagttgtctcatatggtctccatagcccatacgtaaaacagctattacattcatgggcaacctttaacagggtgacacccacagattgggaactattggtaacagctgtacttgagaattcatgccaaatccagtggaaggcattggtaagggaagaggcaaagctccttgaacgtcagggcataaaggaaggttttgaagcccctctagataagcttcttggtcagggtatttatgctgacccacaggttcaggctgaatatgatgacgatatactgtctctttgcaggaaagcagcattaaatgcctgggataaggttcgtgagccaggagaacgtctagaagcttataccagaatagaacagggacctacagaacagttccaggacttcttacaaaggttaactagggcagtagaattacaggtaacagatccagaaacaagacaatcaattatatatacaatagcttatgaaaatgcaaaccctatatgcaaaagaatacttttgcctttaaagatcagatcagctccgttagaagaatgggttttgtatgcagccaacattgactataatgtgcaagatactggagcttgggtaggagaagccatctccaaaggtttaaaacggcaacaggaaattaaaagttctagaggtgaggatgtaagggcttggcaaggagaagcaccttacagaggtcaacataggtaccaagaggttactactactatgaaccagaaccttggggaggaagagccttccccttgagaccacgaaggcgccaggaacctagatgtttcaactgtggtaaaatgggacatactaagagaaattgtagacaaatgaattctaacaatgcctcatatggaaggccactgccttctggattgtgtagaagatgtggtaagggcagacactggaccaatgaatgtagatcgaccagggacatacaaggaaaccccttaaggtcgggaaaccccgaggggggcctcaagaaggcccccacatcgagaaaggtcaggtcatttccaatagcagtggaagacaatctctcacaggaacaatagacagttctttgcatattgtgaaaaaagatattgctctagatggtagtttgaatagtgatgaagaatcaagtgtgaatggacaaaatgagaaacgcatattttggcaagcttctattaatgataaaaggcctcagttaaaagttaaaattaataataaagttatttctggcttagtggacactggggcggatgtaactattattactcaaaagtcttggcctcagaaatggcctcttagagaggcaaatgtacaatttttaggaattggaactctatctagagttcgacagagtgttaactcagtggtctgcattggaccggaaggacagaaagggatactgaaaccatacgtggcagatatagctataaatctctggggtcgtgatctcttacagcaatggaatactcagattaatattcctccagtgtcagatacaaattatgaaaaagatctggtaagacgctatggaaaacggttaccaaccatccatgctgtacagaaactaggtacaaatgatggaccttcagaggagccaaaggccctgccattgaagtggcttacagatgaaccagtttgggtaggacaatggcctatgacctctgagaagctagaggctttagaaaagttagtacaggaacagctagatgctggacacatagaggaatctaccagtccttggaattctcctgtatttgtcatcaaaaagaagtcaggtaagtggagaatgctgacagacctgagagctataaataaggtaattcaaccaatgggctctctgcaacctggaatgccattaccttccttaatacctaaaggatggcctatcatagtcattgatctaaaagactgttttttcacaataccgttacaggaaaatgatagagaaaaatttgcatttactgtaccaactcttaataattcacagccagttaggagatatcaatggagggttttgccacaaggaatgctaaatagccctactttgtgtcaacactttgtacagcaacctttgggaataattcataagaaatttccacaatctcttgtttatcattacatggatgatattcttttatcagattctaataaggaaactttggaacgtatgtttgaaatggtgaaggaagttctgcctcgttggggattacagattgcaccagaaaagatacaaagaggaaattctattaactatttaggttacaagatagacttacagagaatcagacctcaaaaggtacaaattaggagagatcggtatcaaactcttaattctcttcagaaattattaggggaaatttctcaattacagacaattattggtgtagaaggacatgacttaaagcatttaaaaatggcccttaaaggtgataaggacctaaacagtcctagaatattatctgatgaggcagaaaaagagttacaatgggtagaaaacagaatattgaatgcacatgtagatcggataaaccttaatttagactgtattctggttatcttgccatccagagaatacccttctggaattctgatgcagagggaagacactatattggaatggatatttctgccacataaacagaataaaaagttaaagacatatatagaaaagatttctgatttgattttaaagggtaaattaagacttcgccagctgactggaaaagatccagcagaaattatagtacctttaactaatgaagaaatttcttccttatggaaagataatgaatattggcaaatagctcttactgactttttgggaacaattagcaacaactatcccaagacggacagaattaaattcataaaaaagacagtctggattcttccacgtattgtaagacaaactcccatttctggagttcttaccttctacactgatgccaacaaatcaggtaaggcaggttataaagcaggtgaggtaagtaaagtagttcaaagtccatatacatctgtacagaaggcagaattatatgcaattctcatggtacttaaggattttacagaacctcttaatatagttactgattctcagtatgcagagagagtcgtgttacatattgagactgcagaatttgttcctgataatacagaattaacttctctgtttttacaattacaggaaactatcagaaacagaagtaatcctatgtatattacacatatcagatcccatacgggtctgcctggcccactagcacaaggcaatgatgagattgatcgtttattaattggaagtgtgctagaagcctcagaatttcataagaaacatcatgtaaatagcaaaggtttgaaaaaggacttctctatcacttggcaacaagccaaggagatagtgaaaaactgtcctacttgttccttttataatcaaactccattgccagcaggttgtaatcctaagggcattcggagaaatgaggtttggcagatggatgtctttcactttgcagagtttggaaatttgaaatatgtgcatcataccatagacacattctcagggttccaatgggctactgctcttaactctgaaaaagctgattctgttattatacacctgctagaggtgatggcagttatgggtatacctgcacaaataaaaactgacaatgctccagcatatgtctctacgaaattggaacaatttttcaaatattataacataaagcatgttactggtataccacacaatcctacaggacaagcagtggttgagagatctaatagaacacttaaggagatgctcaacaaacaagcttggaagactaaaccccccaaacataggttgcataatgctttattaacactaaactttcttaatgccaatgaaaaaggacaaacagctgcagaaagacactggactatggaaaaaactgctgaactcaatcagccagtatacttcaaagatgtactaacctctgcatggaaaccaggacatgtattacgttggggtaggggttttgcattggtttctacaggagaagaaacactttggataccatcaaagttgatcaagattcgactggaaaaggaaaaacctctcgacaaggacaaatgacaggtattctactaaggtatatcttataaactaaatagaaatctcccaaaggaaagggaagtgttttgcttttatcttcacaggaaaactcatcttcagaaggcaaaagacactgcatgggtagataaccatcaaatagaaggaatgtgccatacggtaaactttacagctgtctctcaaaaaactctatttctctttatttcctagtccctattcaattaaaccaatgctggacttagaggtggatttggctttcctcctctaaaatccaagcacattatttaactaagctttagtgtttctgtgttgtatcaagaagccaattgatgtaatacagaataaaagaagaatttggggactgtctttgtcttttcttggatctttctctcaaggtgtacaccctttcataattgttatgctctcatggttgcattccctagcatgtgtacatacacaagcaaacatttctctgctaactgtttatgtttgagtcccacacagccaatgaagacctgcctgacagcaatccctggacaccctggaaagaaaatgggccacatctcctcgactgcactggatccaacttgctccatttcaactgacactctggccagaggttcgggtactgacttcaatcaagttgaggatttcaagcgagaccttcaatcaagtgaatcccatctaacatggactggatactaacattttctttctacaggaccccacatgactatcatcgtcccatttcagcaggaagtaacttggaaaatgctacgccccctttccccattgttgtcacttaggatagtgtatatacctagttaggaatagcttcctattgtttatgactttagggtttagttaaaatagatagttatcttcttatattttacctttatactgttaagttttaatcctcttttagactaaaaggggaattgtaggggaagctgtagccacgccttcttaggggctggctacaagagtacctgagggcttgtgagggcgtggtcagagtgagtagggggactgcgttttcggtttcggtctctctttgcttcttgctgtacagactaccaccggctggctggttcgctctgtaagtaaggcttttccctattaaatacccttatatttctacctgactccgtactggtaatttcttactatataggtttttttttccttgcctgacagttcctgaataaaaaaaggcttgatatcaattataattgtttggccaatagccaaactagctctcacaattaaattaacccatttctattattctatattttgccatgagatttgtgacatgttacctcacatcttgcttctcccgaggctacatggcatctccctggttctgccttctttctctccatatctttgtttagatttcccttctggcttcattctgcctggctgttggtcatataagcttatttatcaagcaataaaagcaacatatatttgcagcatacagaaagacaccccacatcatctcctctttcctatctaactaaaaagtaaggttttaactttaacatagtaaaattacatataacaaaacagttatcaaacaaaaattacaattaccatatttagcctatttgtatatcacaaaattaaagaaaatactctatcatcttcctatctttgtgaatctaaactttatatctaatttatattttatcacaatgaaggaaaactataattatctagtcttcaacttcatcaaagaccccagaataatatgacattaactaagtaaacaggaaatgcattgtaagcaacttccaaaactctagaaatgacaggggcgatatctggctgtctgaacagtcacccaaagttcttctgtaatgttggggcaaccatcttcaatctataggcctagagtgtctgtcagtgaagcaggaaatttgaaactgtcctgcctatactggcagtttgtcagtcatttttttctctgtgtcctatacaatgtctggcagactctttcatgaagcaggaatcatgaagaactgtcccttcttattttggcaagttcagaagtcactttcctgtgggtcctgcatgtccagcttatacagcacacagtcaagcagtccaggcatgagcagtttctttgcccacatggctaacattttccataaggaaaacaaactccatgtggagattctttgatgcccatcatcttcactgaagtagtttggtataacctgggacagacatgaatcattgtcatgaaaatcttaaattcttaaaacattttaaatgccatattctataggtctttgaagtgtttcaagattacctatccatcttaaatatatctatgcatatctagaaaacctaacttgactacagtttgactattatagatgactattaatttgtatttcttactatacattacatatttaaaagagcagcataaatataccttaaacaagagtggaaataaacatatagaaaacacaattgaccttaagttagtaccaataaatcaaaatccataagaatgtaaaatatcatgagactaacagttttttttattaaagtagattcaataatcttcccctttttattatcataataatctacccttctctctatcatttctatatcatatgtccttttttttctttagaaagaaattgactatgaccattagccatgtatatccaatctcctttaaatttacaaacaattattttgggaattgggtgtatgattgggggcactggtaatctgatgggatcctgagaaaatttagaattatggttaaatattggttatagtagcccatgaggcttcattcattgtctcagtcagttgccttgaaactgttctagatgttgcatcacttagggcatctctttcataggagacctctcagggaatcttacttgatcaaaccatattagcctgaaaggaatccacagcttctcatcttctgtgggaagaaaagcagagcctcttttccaaagaaacatatccttaaacccaaattttgaagtcaaggtacctttaaaatatatatatatatatatatatatatatatgttggtttagcttagcaaccccacaattaaatgtttctctgtagctagttcattagcagttaaaaattcaaagaaaatacaataatacacacaatccagactctctgtgtattttccatctttacatgcccctttatatttttttattattctgtttctcctttaaggaccacagtttattatccttaatttagttttatttttatctgtgactctgtccatcccctatcatctctctcccaagcccatgcatttttatcaaatacactgtgacccatttagaggccttttgtctgaatctgtccttattacatatctgtaatcattttttgaccaggggagtttttaaaacgctaagtgggcacggtcagggccaaggcagcagctttggctgctggctccaccttacttggctttccaacatattggtggtaccagagagagtcacacttacctcccaactctggaaagcagtactaaggaacttgcaggtatccttttagaccccaagctgtgttctgaagcctctttgtactgcagcccctttaagagactgtcagaatctgccatgctgcttagctcatggtggttattgtctgcctctatctctccggcagctgtcaggagatgtgtctgcatcacagctgtcaagagagactaggaagcccagtgaggctccatttctgtgtgtttagaacccttttaaagctttttaaagccttatgtggatccatggcagacagtgggcatcacatgtagctggaggtccccccccccatccgctagtttccaaataaacaccgtgaggcttgatattaattataattgtttggtcaatggctcaggcatattactgactagctctcacaattaaattaaccagccgggcgttggtggcgcacgcctttaatcccagcactcgggaggcagaggcaggcagatgtctgtgagtttgaggccagcctggtctccagagcaagtgccaggatagcctccaaagctacacagagaaaccctgtcttgaaaaaccaaaaagacaaaacaaaacaaacaaacaaaaaacaattaaattaacctatttctattattccatattttaccatgagtaaaagccttaatgacattaggccattaagatccaaggatctttccattaacagtaacaatatcttttgatacattcgaagttaaaaaaatgaactagctttggacacatatttctcattggtgctttcatttaccatacaaatacataattatgcataaatctccatcaaattcttaattgctgtggcttctggaaatatgtaaaggggtagggagacatcatgaaagataatccaatacatacaaatacattgttttatgacaaatgtctcttatggacactggttgttctcaaatctgagattattttgtttttctacaagaataattttgtttagtttttaattcagtaaataagattgattaaatagccacttagactagcttccttcttacgtgatatttttttctaacatgtttaaccaggaagtgcttttaactctacattttcaatacgactcgcatcatctctccattctccatcgccattcctgttagcacagaacagacctttattattccttatctggatggatgtcctggccttgtgactccttagcttcttccaaactcttttatgtccttctgccagattaatctttttaaatctctcttctgatgatatcattcctctattcagaaaccttcaacaacgcctcactgctggccagaaatgttcccttttccctgcaaagcatacaagatgctcctgacttgattccaacccctatctccagtctcagccctcactggtctttacataacctgtactccagccaacctggattgcttgccattccccgaggtgcactagattctccattcttgccctttgcactctttactagatttctctaactttataatttccccgatgctcactgctgcctaacaaatccctgtatccttggaggtcaggccaaatacctccataaaatctttttttcctcttttttttttgataaggaattccaaggacattctgcaagctcctttctaggtctcatggcgtcttattgtgatgtgtaggagtaatgaattatagtgaacttggtgtcagataatacaggtttgaatctgaattctgtcttttattacttcagtgatattttggtgcaaattatttagcctctctcagcctcaatgttctctggcattaattaaaagtgaacagtttcatataattcagaaggccactctaaatattaagtgagaaggaattcataaaaattttacaaaatcatactagtttatatatgatctgcatatggacttgtaactacaaggcatgttttattcatttttgtgtgtatgttcttcaaaatgcttttttagggttttatatatagcatatactaaaagtactttttggattactaaatattttaagataataaatagcactgaaaagaaaaggccaatacctgtctcatgcttagagcccatataaacattgattttgtcagtgcagattttgttcttgtcttctcggtacatttttcattcttcaatcttagtgttgaaaagcatgctatctatttatgttcatagaccattcccccagtatggtactgagtattcagtatccagtgccactaagattttatcaattgagtatggatgtttccatgaagttcttgaagctccatataccattttatagtactgtaacttgaggactagatttttttcattcttttatctcgaaactaatgtgtgcacatgctcacacatgtactcaagtagaagaataagaagagtttttgttttgcaaaactggatttctcatgaatgaggaaccttatttttgccttgaaacccagataagtttgagtaaacagagggaagggtttgggataagaactgtagtaggaaaaagagctcattgttgatttctgtgattgtgccaatgagaaacgaagctaaggtactcaagatcccatctttagccagcacagagggtgagaggtgcattgcttcccagtgggttgttcccaggcagtgtagcattaaggagtgacacaatctctttcttggaagagtctggctgaatgttgtgccattttccgaaagtgtgggtgatgtatcagatgacagtatgcttggaaaaatcactatgtggaaagttcctaatctcttacattttgccagaagagaatccagagggcaaagggaaacctaaggactaatgtatgtgcttctgttccttctgcaacagtgagagctctgttcctgaaacccttaaaggcaaattgggctgatcccttaggaactgcatccattttgacagaatcaaacagtctagaaggttcttatgaagagtgttccatcttgttgtaattgagagatttaatgagaaacagaatgaaggtacaaaggaaaggattgccaggagctggggtcaatcagaggagctgtgggggaacacagatgaacatggagcatggctgttcatacaacactcttgaaaatgtcattgcccatgaacacccaagcttctatcatttatggtgggtaggcagaaattagtttacagatgcagattctattgttgtcctcagtgatgaagaatgtggtggtagattgggcaattcaatgtagaaaaatatctgtctccatctctttgtctctatctctctgtcacacacattcattcattcacttctgcatttccatgagggggtatctgcttctctctaccctgtcttcttgattctacagtgacatgtctcttgtttccacacactctgctagaatccatgagtctacagtgctgtctctccgaatcctcacacactcttctggaatccatgagtctacagtgctgtgtctcttgtactcctcacacattgttctggaatccatgagtctatagtgtgtcttgtactcctcacacactctgctggagtccatgagtctttatttagtgccatgtctcttgctcctcacatactctgatttcttcattgcttttgctggaagccataattactgacactaaagtaaacagacttttgactgattgaaaaggggtaacctcagctttctgtcttcaaaaggacaaatgaaatcaagtatagtggtagatacttgtactgacagtatttgagagcctgatgtaggagactcatgagttctaggacagcctaggttacatggccaaaaccctgttttaaaaacaaaacaaagaaaacaagcccggtggtggtggtgcacgcctttaatcccagtatttaggaggcagaggcagggcggatctctctgagttcgagaccagcctggtctacaagagctagttccaggacagcttccaaagccatagagaaaccctgtcttgaaaaacaaaaaacaaaaaacaaaacaaaacaaaacaaaaacccaaaccaaaccaaagcaaaaaatacaaaaaacaaatataaaaccagaccccttagctggcctgtaatcccaagctacttgggaagctgaggcagaaggattgcaaatatagggcttcctgggctacagagtgagttcaaggccaaacctgtctcaaaaatattagaaagagggttgaggatatatcttagtggtaaaatgctggcctagcatgtgtgaggcccatgtaaatcttcagtacctaaagggtattcaataaatacccagcatatgtgtgtgtgagtgcatgcattcctgtgtgtgtgtgtgtgtgtgtgtgtgtgtgtgtgtgtgtgtgtggccaaatgaaggtaagttaataagattaattttggtcaaattagtagcatatgaattaatgaaatgactatttattattattgttgttgttgttaattttagagaaatccagtgtctgagattgcctaatctcagctgcacccacaggcaccattatgctatgtgattatactttcttgtggcttctttcaagtgattttaaaagcaatgatagagaagcactggacagcagaaccattaaggctcatcagaattgctgatagaaaaatgtcaatgatgccatcctaaaagacatctatccttttggcctcccagacaggaatacactttgcattctaagcaactcaagacagggacctgagaatagtgtagacttttgataataatgctaattttaactactactcccctgaaaacgcgacaaaattcttcatactaaatttgcttctttaatactttaagagtccgtgacctcctcctctgatctggagaaagctgcgtgcaaaattcctcttggctcttgtctgcctacatggttaactagaagcacacatgagctcagttacttgaattgaaaacagacctgagtgaagagctatctgtattgtgttccagtatctccacgtccaacaagttatcagcgggttgtgtggaatgaaaggtcttccaggcatctgggctcatctctgcctagtgatttaatttgagagtccagatcgtaaattggacttaatgtcaaacagcagccaagcctgggaacccgcctgggtgtgctgggcggctgcaggacgactaaccagcaggcatgctgtcatgtttaagtcatttgctgtcagtgctctactccccgtgggaggtccaggtttcgagcatttgcaatagtctagaccagaggtgacaaacatgttgacctttgggacgagattgatctctgtgttttgtgacaggaggcctttccagaagggtcctgggaggaacaatttagaaacctcatcatttgcgactggaattaaacctgtgactctgccccacccagactggaatgccaaaagattttctcaaagctaaagggtgatgtttgtttatttcatcagatttcctgaaatgtttgctttgggctgcaggagccagagcaggaggaagaaaagaaagaggaaaaggtaaaagaatttagtttaaatggctctccaacctgaggccagcactaggttctgtatctagtgctgtatctctatctagcatctcccgttcccttgctccagctgtccctcctttccctcctcccttcatcctccctttgtctctcccttttctcttcttctttccctcctgtcctcctctctctttccttctgtttctccctccttttcttcttttcctttggtgctttttggggattgagatagaatcttgctacatagcccaagttggcctcaagccagtggttctcctgcctcagcttccctgtctggcaatgacaggcacatgccagtttgctttgtgtatttcctttaaacctcatataaggcttacatcaccactctcatgtaatagaggaaaagcagaggttcaaaatgatccgctcctacccaaggctgtgcagcacagaactgctaagatttgtttcaatagtatgtcaaaaatctttcctcaggatttactttcctgcccaagaaaggaatatttcaacttttcccgaaattctggatgttacattatgttaaaataacttgatatgaccttttactttccctataatcatatagatttaagtaaaactcctgtagctttggaaggtggttcctgaaagagaagagaggttgtgaggtaagggagataaggtagaaactgatggagactaatgtatcctaatgtgtattccacgggacactgatccctagatgttctttacacaaaaaagttgtggaacttgacataaaacaatggctttggggagggttgggatttgttcacactttgttgagatcctgccaccctgtgcagtgatgagcatcatatggggctagttttctggggaccacagtttgtagacactcaaagctttactgcttctaatgtttcacacgtttattaattttaggactgtgaataggccagttataggaattttcagtctcttactctgggatgtcagtggatacaaagccaactcaaagttccactctgagaactgcttagagagaatgggggagatgtgtccagcctggagaaaagtcttccaaaatgcacagcatgtgcttttgtgtgctcacaggcccagagcatttacacagatcatcttctgataacgtgccattagtacactcaaagattgcacactgaaaggccatttactttttgcccattgaaaaaatgactaaactacaatgtgattttttaaatttttttttcacttactctccttgactttcctgtttcttctctccttcttgtaccctttcactccatagctgactgtagccagagtccattacctgggcagtttgctattctggggtagatgcactaacactacacatacaactctatatccaaagtctttagccatctccaaaatggacttcacatgtgtaagcctggccatttgaaaacatgattcctattgggattaaataaggcttgggattaataaaacttttcctgtttggaaatgagtttacctagtatctcattctatagaatgtcaaataaaattaggccgttcctttagttatttattttggatttgttcatgtgtttaatagtacactagagatggtctttatttgatttaaaaataattatatttatatagaaaaagaggtttcaaagctaggggggattacgtaagcgtatatcctactttggctgtctcaagatgtttattgatttatttagtggcaataaaacatttcacatgaactgcctatttaaaggagaataatgtgtgctctgagaattctctctaaatgtatcaggaggcttaatttttatttgtgctgataaactgaaacccaatctcctaggctttcaattcagtacttagaagagtaaggccctctaaagggagcaagagacaagtccaggtctccagcgggaagcttgggaatatgccactcagacacacaaggtagctcagcaggcttgcctgaggacccctgcccgaaaacatctcccaatgcaagcaagctgtcgtctttaaacaaaggaaacatgtcaccttttgacttctttttcttgacactcaagaaaaattatattcccagaaggcagaatggctttgaagtagtctgcaaagagagagacacacagccttctctgacaagtggggttttcagatccctctaagcttggttcgaagtaggggagcaggatccttgcttcagatacaacagctgaaatttttcttcctctttgtcccaagaccgcaaattccctttctcgtgttgcatggagtctgtttataggcagattctagttactctgtggagcatggggtgagtcacagcagagtagcaggtaaacttatggacagtgtatgtgctttctgtggcaaagcccagatcatcttggatccctgtagatgagattaaaatattggctgttgtgttggaagcagaaaagaacagtgtccttcagaatgaatgtgttcttttatcctaaatgtttctgattatggcccaaatccttaccctaactctttcagtgtgtgtgtgtgtgtgtgtgtgtgtgtgtgtgtgtgtgtgtgtgtgtggtgtggtgtacctatgaatggagaccaggatatcctggggtattgctcttcaggaaccgttcactttttgttttggtgacagttttcactggcctggaactctgtgagttgttgtaggatatgtgtatactgtatcagaatgtatttctgtgattggtataataaaaagctgaacagccagtagctagtaagaggttaggggggacttctagggacagagaggactctgggaaggagaagggagaagatgccagaagacacagagcagaaacgggaggtgcaagatggaagagaggcaatgctacttgatataatgtggattaatataaatgggttaatttaagttacaagagctagttgagacaagccaaagccagaggccaaactttcataattaataagaagtctccatgtcattatttggcagctggttggagtgacagagaaagactcattgagtggcatagatgtctcatatatatatatatatatatatatatatatatatatatatatatatgtgtgtgtgtgtgtgtgtgtgctgtgtgtgtgtgtgtgtgtgtgtgtgtgtgtgtgtatgcatgtttttacagtagcttgcaggttcactgctgtgtgtgtgtgtgtgtgtgtgtgtgtatgcatgtttttacagtagcttgcaggttcactgctgtgtgtgtgtgtgtgtgtgtgtgtgtgtgtatgcatgtttttacagtagcttgcaggttcactgctgtgtgtgtgtgtgtgtgcatgtgtagcttgcaggttcactgctgtgtgtgtgtgtgtgtgtgtgtgtgtgtatgcatgtttttacagtagcttgcaggttcactgctgtgtgtgtgtgtgtgtgtgtgtgtgtatgcatgtttttacagtagcttgcaggttcactgctgtgtgtgtgtgtgtgtgtgtgtgtgtatgcatgtttttacagtagcttgcaggttcactgctgtgtgtgtgtgtgtgtgtgtgtgtgtgtgtatgcatgtttttacagtagcttgcaggttcactgctgtgtgtgtgtgtgtgtgtgtgtgtgtgtatgcatgtttttacagtagcttgcaggttcactgctgtgtgtgtgtgtgtgtgtgtgtgtgtatgcatgtttttacagtagcttgcaggttcactgctgtgtgtgtgtgtgtgtgtgtgtgtgtgtgtatgcatgtttttacagtagcttgcaggttcactgctgtgtgtgtgtgtgtgtgtgtgtgtgtgtgtatgcatgtttttacagtagcttgcaggttcactgctgtgtgtgtgtgtgtgtgtgtgtgtgtatgcatgtttttacagtagcttgcaggttcactgctgtgtgtgtgtgtgtgtgtgtgtgtgtgtgtatgcatgtttttacagtagcttgcaggttcactgctgtgtgtgtgtgtgtgtgtgtgtgtgtgtgtatgcatgtttttacagtagcttgcaggttcactgctgtgtgtgtgtgtgtgtgtgtgtgtgtgtgtatgcatgtttttacagtagcttgcaggttcactgctgtgtgtgtgtgtgtgtgtgtgtgtgtgtgtatgcatgtttttacagtagcttgcaggttcactgctgtgtgtgtgtgtgtgtgtgtgtgtgtgtatgcatgtttttacagtagcttgcaggttcactgctgtgtgtgtgtgtgtgtgtgtgtgtgtgtgtatgtttttacagtagcttgcaggttcactgctgtgtgtgtgtgtgtgtgtgtgtgtgtgtgtatgcatgtttttacagtagcttgcaggttcactgctgtgtgtgtgtgtgtgtgtgtgtgtgtgtgtatgcatgtttttacagtagcttgcaggttcactgctgtgtgtgtgtgtgtgtgtgtgtgtgtatgcatgtttttacagtagcttgcaggttcactgctgtgtgtgtgtgtgtgtgtgtgtgtgtatgcatgtttttacagtagcttgcaggttcactgctgtgtgtgtgtgtgtgtgtgtgtgtgtgtgtgtgtgtgtgtgtgtgcatgtttttacagtagcttgcaggttcactgctggctaagactaatgattatttttctaccttggtaatgaaggtacctttgctgcctttctagcactatgaaaatgaagcttccagatcttgaaacctgatttcttcatgttctatgacttaaatatgtggtgttttcatcaataagatgtgactatgaaattctggagcatgtcgtgacagaaacatcaacagcttataatgtttgaagatctatgggaactcattgaatgacagctcccaaaaaaagggttctttctcctggaagtgggatttatatttgacagcctataatgtcctggacaactgctgtctctcattacagggtactcagccaaactctatttaaaataagtgtaagtgtatgtgtacattttaggaagcttacagtagtaagtttccatttagctttcccaaacttctttagtgttagctatccttctttgtattcctgttcctccccttacccccttctgccccagtttaactcttcttttatgtccttattccctttccaaacccactattttcttttctgtcttctcttaaaagtcgtaccccaccccccacccctgccctgccaatgtccatgattccttactggtttcctgaatgtgctggctagttttatgtcatcttgaatcaatctagagtcattgaggaagaaggactctcaattgaggaaatgtttctctaacagtcatctataggcaagtcttcattgcagtttttgattggttactgacgtgggtgggtccaattcactatagatagtgccaccactggcatgatcctgggtgttaaaggacctgagcaacccaagaaagcgagccagaaagtaaaactcctccatcagcatcagttcctgccttgaggtcttgccttgagattcctagatgatagactgtaagctgtaagatacaataaaacctatcttctccaagttgcttttagtcataatgctttatcacagtaacagaaaccataactaagacattgacttctatggatatgtgacaacttaaaaatatatatctgaagattcaaaactagcatccacaaatgagagaaaaacacatggcatttgtttttctgggtcatggtgatctccaaatggttgtctccagacctactgatttacctgcaaattccacaatttcattttctttatatctgaataatatcccactgtgtaaatatatcacatttcaattattcatttatcagttcatgggcatctcagttgtttccatttcttgtttattgtgactagagcatcaataaatgtgtatgagcaattatctctgtagtacaatatacagtcttttgggtatatgctggtatatttggatcacatagtaagtctatttctagctttttaaggactcctcaaagtgatgctctgatttccatagcgattgcatcagtttgcactcccattaacaatggataagtgttttcctttccttacatatacacctgcatttgttgtttttaagatttttttttaattttagctatttttactggggtaaaatgaaatttcaaagtagttttaatttgaaattacctgatggctaaagatattgaacatttaaaaacatttatttcagccattaatatctcttcttttgagacttctttatttagctttatgtcacaaatttaaattgggttgttttcttgatttcttttttatattatagtagtaaaaccccttgtcattcaaatgatattgtccattgtttctagtttcatgaggtcttattttcaattgtggttttataactgtgctatgtcctgctcagaaagtcctttcttggcttataagttgaagcatattccctatttcatctataaatgattcaaggtatcaggcagtatattgaggtcctgaatccatttggagttgagttttgtgtagaatgagagatatggttctagttttcactcttctataatgttaatcaatttgaccagcatcatttgcttcaacaaatgatgtttcaacaaatactatcttttctgcgattcttactctttatctctttaaaaaatcaggtggctgtaggagcatgggctcatatatgagtccttaattctatcctactaattagagtatgtatttttgctagtaccatgctgtttttattactatatatctcctataacttaaatcagggatggttattcctctagagcaatggttctcaactttcctaatcctgagacccccttaatacaatttctcatgctgcggtgaccctcaaccataaattatttcattgctacttcataattgtaattttgctactgctatgaatcgtaatgtaaacacctgatattcaggatatctgatatgcaaccccctgctctagagggttttcaaaaattgttcaatatttgttgtgggatattttgattacactttgacactcctgagaatgacaatgaagtttactttgaaacagaggacagagctaacttctagctgaccaaaattagtcatagaggttttggaggactgaggacatatagagagacgtaggaagcagtagggtggaagttaggaagattctggtggccatctttggattaaggaaggagagatagaggaagttactggtcacgtctctgcacttctggttcttccctgatatctgactcctgagattttactgataaagaataattagataaatgcttcatctggtatctataaggcccagccatgacaagatgaatagaggcccgagttttagattaccttaaggcaatacctggttctaggaaagaccacaaactgagaccacccaggcactacccaggactggatcatccaaggggaaagtacctaacattccaaagaaatttcctaacatatattgatacaaatttaagattatgtgtattttaaaatactgtatatatgtttctattcttgtttaagatatttttgtatgttgattgaaatttaaggttatttttactttaacacactgtatatatgttttaaccttctttaaggtattttacctatgcaactcattttaaaatgtaatgtaaagttctagtccataaaggctattattacaaaatatttaagataatagttagtcatctataacaatcaaatttgtggccatgttaggtatgttttcaaggtcaaacaggtatgttttagatagatacatggtcttcaaacacttcggatacctacaaaatacggtatttaagatgttttaataacataaggcttttcatgacagtgagagatgtctgctccctgcagcaccaatttatgtcaaaaaaggatgatgaccctcaaatagcctccacatattttgctttcattattgcaaagttagtcactggataagagaccacccttgccttgacttctgacagtatgctgttcaaactggacaaacaggacacacacaaaaaaacaactcctgaactttgccaagacaagatatcaatcattcataattgacagaaaagtctgtcagatactctaggcctgtgggttgaagatggtagcccagcattgcagagaaactttgggtaactgtctaggcaaccaaatgtatctgtcatttttatagttttggaatttgtttgctctgcactttctgcttactcaagtaatattatattcctctttggtttctgatgggtttgaagactacatagttatagttacagtttttcttgttaccaaatgcagaaaagaaactcacaaaaaaaggtgtgaagtatataaggttgagagacataaaagcttaaattgtttatctaagaaaatgttttgaggtctaaaaagatagttttgggctggttaagatagaacgtaatttgggtacaaaacttgggactcgccaggatgggtaactaatggaatatttttttgcattttccaaaagcaaatggactggttaatgtgaatgtaattctcacttgataactgttcttactgcatatagttttactgtgttagagttaaagccttccctttttatttagacaaaaagagagaaatgttgtggtatattttgatcacaccatgacactcccaagacgactgacaataaagtttaactttgagtcatagggtggagctagcaactagctgaccaaaattagtcatggaggttttggaagaacaaggatatatatatatatatatatatatatatatatatatggtaatagggtggggcttagaaagtttctcagccctttttggatcaaggaaggagagagagatgaggtcactggttgcttctctgctgcttctttgatcattcaggttcttccctgatatctgactcctgagtttttattaacaaagaataattagataaacacatcaagcattttttcagttatcttgggtgcttgtgtttccatatgaattttaagatatttccaattttgtaaaactgtgcactggaacattgatgagtattgtgctggatctgtagattgcttttggtaagatgagcatcttcacaatattgatcctaaccatcattgagcactggaaatctttgggtcttcttcaattttttcaatattataacattttcatggttcaaatctttcacttccttgttagatttattacaattacatttattacatgatttgtatatgtatatatgaatatgtaaatgggattttcccccgatttctttctctgtatgtttgttgctgatatataggtagggcattgatttttacggattattttctatcctgctatctgcttcaagtgtttgtcagctgtaaaaattttctggtgggatctttatgtatagaaccgtaacatctgcatataaggatactttgatgtcttttcctatttctatccccattatatccatctcttatcttattgtgttggctaaatttcaagaactatattgatctggaagggagggaatgtacattcttgtctagttcagaattctattgaaaatgattcatgatttttttctctttaccaagatgtttgttggctgtgggcttttgtatattgcctttattaaattgatctatatgtcttatatccttacattctctgggatttttactatgaaggaatgtttgattttgtcaaaatcctttttttgtgtgtgtctaatgaaattatcatgttgtttctgtgcatgaccatttatgcggttaagagttatcatcaaaagacgtgtgttaattactcagaggtgcaggcatggttcaacttatgtaaatcaataaatataatccaccacataaatactcatggacagaaaccacatgatcatttcaaaaagactccacccaaaaacttttttttttgtttttttgagacaggatttctctgtgtagctttggagcctatcctggcacttgctctggagaccaggctggcctcgaaactcacagatatccgcctgcctctgcctcccaagttctgggattaaaggtgtgcgccaccaatgtccggcttccacccaaaaacttttacagctgacaaatgcttaaagcagatagcaggatacaaaatcagtgtgcttgaaccaactccccaaatgaaaagccacagaccaaaagactggattagaaagcaagatccatcttcttatttccttcataaaaacacactcactctcaacagcaggcatcaacttaggataaaaggaaaggtattccaagcaattagatagaggaaatgaggcagggggtatttgcccttaaatcataacccataaatcataccaggtcataacctgaaattttccctatctgtgtcttttcagagctaatagtactccatatttatgtactccttcaacagtctcagtataactccccaatcagatttcttccttcttttcattttctattttctttctttcatgtctgtttgtctgttgtctaagcaaacagctaataacccttatggacaaggttcactttacggggttctctgccatacaggtgaaggaatgggtcatttgaagttggtcactgtctttggtggaaacggggcctagggatgttagggagctctgttgagctgtgttagggcacctaatctgtcagtctgaggaatgagaaagaattagccagaaagtcactcagtatatcacagcaggccatttccttatctccctctcatcactactgttcatgatataggctagttctgtcctagttattttaaggttgggcctcttcaatccttactgtggtttttgatgttgtaagccaggccaagtgtactttgtgccagcaagttcagggaagcagacctcatgctatgggaattaattactagggtctgccttcctcctttttgcttgagactcactcacatggttcccttatttctcatcccagaagtggatgaccgcagattctctgtctagtcagaaacccaatgccaggcatcatctgatttggataggaaaagattttggacgtgtgtgtgtgtgtgtgtgtgtgtgtgtgtgtgtgtgtgtgtgtgtgttcacattcgcacatgtgtctctctttgtgtgtagctcattttcctacttgaacttgaaaggagttcattgtgctttctaattactctgctgtatactagtatttttataagaaagttctactgaggaggagacatcctgctgggtcacttcagtcataaattcctccatcagtacatcaactttgtactctaaaactctttgctggcatctagctccctccaacctggagtttttcagtataattactggtcttttatatttacccaccagacttttcagtaggtgacttgctgtctttcatcatggctgttattaccatgatcaaccattttacacaccattaaagaacaggagaaactcacaagtctggttctaagaggaagcagaggacttgtaatcaccagctgccagttttcattgtggctaaaagtcagaaaatagctgggtagtcaggagccaccaaataaaacatacctagagggttgatgaatattaacagggatttccctgttagtggatataaaactttataaagattcatttttctagtccaaaaattagcatgcaatatttatgataagtctcttagagcaacatcattcttctttactgggttcaattcccagcaaccacatggtggctcacaaccatccgttttgagatctggtgccctcttctggtgtgcagatgtacatggaagcagaatgttgtataaataataaataaataaaatctttaaaaaaatatcacaataaaatatgatgacaattaacgctagacctatttgtgacacaaagttttagaaaagcttgcaatagtttgatatgtttaggaatttgtagatgtgactacatctcatgtagatgttattaaaatgaataagtgagtatcatatgatgtcccctgtagacagagtttctgttctgtctggtcctgctgcccttcagccccaaataaatacacaaagacttattttatttataaactctttggctgatggcttagattcctcactggctaactctttcttaattattagcctataactattaatctatgtatttatacatggccttatcttaccagagaatgcctgacacatcctatcttcccaggtgctacatggtgtttccctggccacttctctgcttcctcttgtcggaattctgtttgtctggtagtcctgcctatacttcctgcctggctactgccaattagtgttttattcaccaaccaataagagaaacatatatacagaagtacatcatctccctttttctttctaaataaaaagaaaggttttaactttgacatattaaagttatatataacaaaacaaaacagttatctagcaagaactatagttaacaactattagttcattaacatttggcaaaatttaaagaaaatattttatcatctatcctatctttgtgactctaaagttttatgtgtgacttatcttttattataaccaggaaaaccataactgtaactatgtgtcttcaactccatcaaagacctcaaaaggataatatataagctatagaattgacagagacatctctctgcctggatagttaaccaaagttcctctgcagcattggggcatctatcttcagcctacaggcttagagtgtctggaagacttctcatcaaagcaggaaattcaaaactgtccaacctgtattggcagtttgtcagtcatttttctgtgccctgtagaatgtctgccagactctcccatgatgcaggaacgctgaagcactgtcccaccttgttttggcaaattaagtagtcattttcccgtgggtcctgcatgtccagtttatacagcatatagacaaacagttcaggcaagaacagtttcttgcctaaatggctatttcttctatgttgaaggcaaactgcatagtttcttcaatgcctatcttcctctgacataattggtgttgccagaagttgtgtctcactgtcatcaaaaaacctattaaaccattttaaatgccaaattctgtaggtcttttaaagggtttgaaaaatacctatccatttgaaatacatctctgtatatctagaaaccctaactaatgtaactataagttttgactattaccggtgactatctataatctgtatttaattatacactacattttaaaataaattgtataaacacaatatataagcaagaatacaaatatacctataacaaaattgaccttaaatttgtatcaataaatcaaaattcataccaaagcaaagtactaatttatatatcatattcccctttttttctttagaaggagattggttatgatcattaaccatttataatcaaccacatttaaatgaaaacaaacatttataaacaatatgtgggaatttgggtatcattctctctaaactgcttcctgctgtttgggggtgctgtcaataccatggggatcctgagaaaacccagaaatcttgtcaaattctggctgtaatagtctgaggctgcattatgtcagttgttttgaatgttggatcacctgggccactgcttcagggggtcttgcttgatcaaaccatattatcctggaaggaatccacagctttttatcttctgtggaaacaaaaacagaacttcttttccaaagtaacctgtccttagacttaaattttaaagtcaaaatattttcaaaatatataggttgtattaatccaacaataattataatcaaatatcttttagcagctgttgctccttcctcagcagtcaaacaattcaaagacaacagaataacatacagtatctagactctctatgtattttccatctttacatggttttattttattattctatttcttttatttttactttttatttttgttttttgagacaaggtttctctgggtatttttgcctgtcttgggattcactttggaaaccaggctggccttgaaatcacagagctcagcttgcctctgcctcccaagtgctgggattcaaggtgtgtgcctccacacgcagctactctatttcttttgtaaggactttctctttccttttttcccttttctatcctaagtctacatatactttaaaacacactgtaaaacatttaaaggtttttcttcatctgaatcagtctttactgtatatccctgtctttttctgaccacataagtctttaaacagcatggaaattaaaacagtggcttgtactgtcctattccttggctttctgagagtagcttcatggctggtgggagccatgcttatcgacacaactctgcagagtttctaggttcatgtcatcaccaagaagcatgctgctggctgctcgaagacaccacttaattgtttgttagcagggcctcttgaaagagctgtgtggtttttgccaatactacttagtaaggaagcctctcttctaggaaccttgaacctccacttgcctctagcaaatagagccctcccaagaaaatgctgctaccaaggagctgtgcttgtctctgttattttgtgtttagaatcctttttaagcttttgtaaggttttatgtgaaattcttgccccatgttgtttcccaggagagaggaagcagagagaagcagccagggagacaccatgtagctacctggaagataggaagctccaagtattctctggtaagataatgtcatgtagaaatacatagattaatagttatgtgttaataattaagagagagctagccagtaagaagcctgcaccattggccaaacagtttataattgatggggaatattcttctgtgtatgtttatcttattggttattgaataaagcactgttggccaatagggaagcaagataggtgggactaggagtctcggagaatttgggggaaatgtagtaaaaagaagctgctacgtgatccaggcaggaagtggcatagcaggccagaatcagtatataagcagggacaagcaggaaatcacgcccttctgtctcttctctgtgaagatgctgaacagacacaatgtcgaccccaagaggcccagaccttatctccagtaagataaggccacctggaaatatttacattagaagtgggttaataattaagactgagctaacaaataagaaaccttagccaaaggccaacagcttaataacaaatatagcatctgcatgtttctttgggggcaaaaaagggcagcaggacctagccgggccaagaaaaacctcacattatatataattaatgtaaatctttgtgtgtttatttagggccaagtggctgtgggaccaggtgggacagaaacttgatctacaggccccaactgttggatatggccaactagatgagagatgcttttatgagtttatctgggggaaatccatttgttcattcatttactacaggaggtgttgggatgtcctgcacagaatcccctgcaggtctgagacttgctttgctgcttgtcctgactctcagctgctggtgcttcatagctgagactgctttaggagggctggtccaggctgaagggagctgctgtccctaatgaccagggcaactcacaatgacgtgtccctatggaactgcaaggctgggtacatctctgaagaaccatgctagccctactgcacctgacttgtgtcatcccttccctcacctgtagccagcccctaagaaggcgtggctacagtttcccctacaagttctgcttctttcacgagtttccctaagatttacgcctgtaaatttcctgaacacacatctttgcttcacagcctggttccccaaaacaatcaattacaatctcatcaaatcatgagtacctgttttacatcaaatatggcgcccgtcctggggatatattagaaagcaggaagaaagggcttttgttagagtgggcagggattatattccagtgtgggacaagtggctcaacaaaacatgggtattacaaaagaaggcttcagatggtggcaatattaccaaggatacaagtcaagaaaacatattgagaccctgtttgaggcggttgtgccatgtttgcagtgtgtgcacatttgtgcccagggaaactcaacttcaaacagtgagagcatttgttgagaggattgtagatcatgaaggggctgggatgctgacatgttaagaaaaggtgctcagagttcaagaggaacgttggcaacccattagaataattagtgagaaggaatgatgatgtgtgcctggaggagagagttctgcatgaagtaacttttaatctggagactgggtagcacacacatcaacttaaagcaaatttaaccttctcattcttgtcctgttgtatgacttgtggctttaagatcagtgggtattccaaataaaaattccagtgttattctccctaaagttcaactcactgcgctgttcacgaccgaggcacgttctccatccagaggcatggccttagaatgtaaggtagaatttggaaaagttctttgttttattcatacatgctttccattatttctagaaaataatttagaagcaggccttttggtggttaataaaaaatgagatcatctcagaaagatcacacaaccttttttaatattgcagaataaattgttcactttgtaatgtaaaactcactgttttccctccccatcaaagtatttttgaaataacatcattactccttattagctgaatgcaaacaggatagtccttgacaatccttgcctgttagacttctttaaccgtatttcagcattctttgcaaccgcttcacaatgtgtttgcctctgatttcaaagcttctttcttactagttagcttataatgagctcagctctgtaagcactgagggctcaggagttccaatagcatgaaagtgtcaggcttagaggaatgggacagggacaactccatggtgctcctgcagtattaggaagcctttcttggggcaaagctagtttctccactcccactagtattccaagaggataaagaatgtaatctatcttcatctacattttagctcaagacatagaaacaaccattctaaaagtcgtgatagtccagtcaactgctctggaaacgagtgtcgattgtttcaggcattcaaacggaaaaggattgtggaaaaaaatgggcaagtgttgaagccattggcaacatggaggaagtgattctgaattagatgttgatttgaatgaggcaaactagagttttgcattcaagccaaacttttgtgatcttttggcaagagataaagctgcaagtagatgggaaaacagcctttgttgtaagccactgagaactggggctggtgggggtgtttcttctctagcatggccgagagcttcttgtttctgtagaaaagtatcagttttccatcagcttatagactgtgtaagtctttgactgctcctgataatcataacagttaaaataatggcaacatcactctgtattttctatgccccaggcatggtgttcagtactttatacatatacatgacccaatttcttcctcgcagccagctgaggagatacattattaataccatatttgatttatatatgttataagaaaactgtggcaaagcatttaagtgggttactgaaggtcccacagctgtcaagtgatagacagcttgttagtcctggctaagtctgaagtctaggctctcaagcagttgtattactattcgtctgtcaccttgagtctcaaccttcttacctgtaatcccaggctagtatatagccaggtgtcttcttccctccatttgacacagctctcaggaaagatgtgggtcaagaaagatgttcagttttccctctgcacttcccagagcaatggaggaagagtctaaaaaaaggatcctgtaaggtagatgtcagtaggacactagagcattgatttgacaatgttgcatttccctgttgggcctggtttgcgttgctgtgatctggtagaatacctgtcaggatgtgatcaaccattagggctctgaaaaggccccattgagatgaaaggccaggatggaagctgtcttcaaggctcattttcagcaaggtctcaagacacaattatgctttaaatgtttttcaaggtggcttagtcttaaaggaccaaaaacaaaacaagaaaacagcaaacaactcatccttcctgtgtggtgaatagatgcatgaggaatgccagcaaattcagccaatagcctgcttggttgattcctgaaatagtaagtggactacaaagtgtcacaacaaaccacaaacaaccacagaaataaccgggcacaagcattcctcagattgtttatatactagctgctctttctgaaatctgaaaaatacatcatgcctggacttgccaaagctccaggaaagagagtggagaggtcactgttctccctgccagcaatctcacgtttctcttttagcagggcatttcctcataaagtggccatttctgaaggtctctcgccgtttctgtctcttccagtctctgtctctttcagatattacactattgtctaggatgacctatagctcagtatgaagcccaggctggccttgaacttgtgacaatcattctgcctcagcctcccaagttctgagattacaagtatgagccaccaatcctggttccggtggttttttttcccctcctttttttatttgaattagaaacaagattgttttacatgtcaatcccagttccctctccctcccttccttccctactacccccccaactaaaaccctacctatcacatattctttctgctccctagggagggtgaggccttgcatagggggtcgtcagagtctatcatatcctttatggcctagccccacccccatgtgtcttggctcagggagtatccctctatgtggatcccaaagtccacacctatgctagggataagtactgaactactacaggaggtcctgtagatttctgaggtctcctcactgaaacccatgttcctggggtctgaatcagtcccatgctggtatcccagctatcagcctagggaccaagagctcccattgttcaggtcagttgtttctgtgggtttctctggtggtttctttcctataaactttctatttttacctgaagtttgacctactttgatccacttattacaaaatcacttctatgggaacggaatttttgtattaaattgagtctaatgcaaacataaacttccacctttcttaacaatatcaagtgtagaaacaagaccaaacaagatgtgggggataaagaccaagagagaagagaaactgtagtatttactaatccttgtcatggtggtgttgctactagtacctttccaaaggaatccctttcttatgtgcttagcaaaacaggattacaagcccatggaaatgagcaagggaaggggttcaggcgagaattggagaacaaattcttctttttccaggcagcaagacaggcagtggtcattattgctgtgggagttctcttgcactttctcctcctcttttctttccttctctccctccctccctccctccctccctccttctttccttctttcctcttgttctcttctttctcattgtccttctcttcttcccttcctgatttttatttttaatttttttttttttttagctttgggagaatatacatgaaattctgacctccagagtttaacaagtctacactgtgtcagttggatatatcttgttagggttccattaaatatctcccaaaaggggcattagaattcctaattttgatgggccatgcctgacagaaaactagataagcttcctgcagacctttcttttgtccccctcttccccaagatccaattccacagtctcattcaacactctgcagcagaacatttgtggcagcctatcctgtcccagccctgctcccatctcctgtggatcccacatatccttcccttctaacctccctcccctgacacattgctttgttttagccccatccccagcagtcaccctctgccaccaaccacatggactggcccctcgggaaacaagtagactggagatagacccacacctaccccacccttcctgagatcctatcccccagagtcaaccccagttgtgtagcagtaaaactgttgttgtctcccttttctctttgatcccatcctcaatggattacaaagatcttctcccacaacctccctttccctaagctatcccattaaccaaccttcaacaccagcaggcatttactgggaacacacccactgagccagaaagggaaacatcaccgaaccccagcaggcaccacctactaacccatgttccttgtgaacacactagatgagcagaccaggaaaagaggcaacagacagccatcatactctaaaattccagagagcaaatagtaactaaggaacaaaaacatccacccaacaaagacaaatcaagaaaccagcatgtagacctagaatcgccccaaaaccaagatgcctagacaccatgaaaacagttaacagggaacaatatatattcactatagcccagctatcttaccaagcagaccctgagtatttcaacacagctgaagcacaagcaaaagatcttaaagccatgtgtatggagagcatagatgtacttaaaggggaaattaatagatccattaaagaaatacaggaaaacataaacaaaaaatggaagaaatgataaaccccttaaagaaagtcaagaaaaaacaaacaattgaaatagaggaataaaactattgaagacttgaaaatggaaatagaagcaataaagaaaatacagacagggagacagtggagctccacaaactgaagcttgctgaactaaagcaagagtgccttgcttgtggtttagagaccaagggaataaaacaagatcttatcaacaagttccaggtgtatcttgaagaacatgctgaagaggaagcaaatgaagaagatgtactgggagatgaaaccgaggaagaagaacaaagcctatagaacttccttttaaagaggaagaacctcctgaaaaagctgtttatgtcacatccatttcttcactggcattggaacctactcttttgggattccagcatatacagaagaccagctgaaacatccagcctcatgggactgagcaactactagattcttggactttctcttcatagctagtcactgttggattagttgaactgcagcctggcatcagaaaagaaggtggtaaaaattacatctggaagacctcaaactgagagaatgcagaagagggctgaacggttcaacgtacctgtaagcttggagagtaagaaggctgtgcgggcagctagatttggaatttcttctgttccaacaaaaggtctgtcatctgacaccaagcctgtggttaacctggataaactaaagggagagatttggtttgaatgtctcttccatttctagaaagtctgaggatgacgagaagctgaaaaaggggaaggagagatttgggattgtgagaagttcagcaggaactggaactctagaggatacagaggcaaagaaaaggaaaagaacagagcgttttggggattgtataataaaaagttattgctttctgcctcatagtggtctccatttctcaaattcttcatggatttttatacacacacacacacacacacacacacacacacacacacacacacacagacacacacacgtcatgtgcctcacaatgaagaagcgtgtaccttcttagatgtgcatccttggattccagcagcagtttgatttaactgctactctgcatttaaattgttacatttttgttttttattattttgcttattaataaaaaagaaagagaaaaaagagaatacagacagagggaattctgaaaatgaattacaaaggcaagcttcaccaacagaatgtaagagatgggagagagaatctcagacattgaagatatagaagaaatagaaaatgttaaatctaaaaacaaataataaaaccatacattcaagaagtctgggacactatgaaaagattaagccccagaatacttggaatagaagtaggagaatcccaactctaaggcccccaaaatattttcaataaaattataaaagaaaattttcccgaccaaaagatgatatgcttgcaaaattacaagaatacttacagactaccaaatagattgtataaaaagaaagtcccctcaacacataataatcaaaacattaaatatacagaacaaagaatattaaaagctgcaaaggaaaaagaccaaataacatataaaagcagaccaatcagaattatacttgacttctctttctttcttttcttgctttgagacagagttgctctctgtagccctggctgccctgaaactcacttttagagtgggctttctttgaaccacagagatctgcttgcctctttcttccaagtgctgagattaatagtttgtaccaccatgcctcacaaaacagctcttgctgttgtttttacacctgacttctcaatggagaatctaaatgttagaagggcctgggcagatatctcagagactacagatgctggcccagattaccataccccaggaaattttcaatcaccatagatggagaaaatgatatattctatgataaagctaaatttaaacaatatctatctacaaatccagccctacagaaggtgctgaagagaaaacactcacctaaggaggttaactacacccataaaagcacaagaaataatctcataccagcaaaatcaaaagaagggaagtacacccaccaccaccaccaccaccaccaccaccaccacgaccaacaacaacaacaacaacaataaaatagtaggaatcaacaatcattggtaattggtatctctcagaatcagtggtctcaattccccagtaaaaaaagacaaagactgtgaaacaagatccaactttctgctgcagccaaaaagcacacatcaacatcaagggtagacatttcctcagggaaaaggtgggaaaaagatattccaagcaaaaggacttaagaagcaagctggtatagctattttaatatccagcaatttcaaacaaaatctaatcaaaagagatagggaaggacactatataatcatcaaaggaaaaatccacaaagatgacatttcaatttttatcatctaagccccaaacacaagggtaccataattcataaaagaaacactactacagcttaaactacacattgaccttcacacactgatagtgggatacttcaatgccctattcccaccaattgacaagtcacccaagaaaaactaaacagaaaaaattctgggcttaacagatattacaaaccaaatggacctaacatatctaaagaacacaaaagaatatatcctcttcacagcatctaatgtaactttcaacaaaactgaccacatactcagaatgcaaaacaagtcttaacacattaaaaaaacaaaaacaaacaaaacccccccactagcactgggtgttggtggtgcatgcctttgatcccagcactcaggaggcagaggcaggcggatctctgtgagtttgaggccagtctggtctacagagggagttccaggacagcctccaaaacaatacagagaaaccctgtctcaaacaaacaaacaaacaaaaaactgaagtaactccctgcatcctgttacatcatcacggattaaaactgcatatcaacaacaacagaaacaacagaaagcttataagttcatggaaatggaacaattctctactgaatgaaaaataggtcaaggcagaagtaagaaagaaattaaagacatcctagaatttaatgagaatgaaaatatcatattcaaacatatagtatacaataaaggtgttgttaaggaggtatttcataacattaagtgcctacataaaaaaaatggagagatctcatactagcaacttaatagaacactgtaaagctctagaaaaaatagaagtaagcaacatgcaagaggagaagtcaagaaataatcaaactgagggctgaaatcaataaaaatagaaacaaagaacaatgcaaagaatcaatgaaataaagagtcggggaaatcaacaagacagacaaacctttatcccaactgactaaaaggcagagggagagagagagagagagagagagagagagagagagagagagagagagagagagagagagagagagattatccaagtttacaaaatcaaaatgaaaatgctgacataacaacatacagtgaggaaacccagatagttttaaggacaaactttaaaaacctgtactgagccaaactgagaaatctaaagggaatggataattttctcagtaaataccacttaccaaagttaaatcaggttaagataaacaatttgagggatgatatggaaacctagtgaagtggacacattctaaaatatctgaaggtgaccctaatgaggtcctctaataaaggaatacagactctcaagtggccacatcttgtcaccaaacaaggcttccagtagtgagactgggttgcattcaattgaattgttggtgagggggggtcccatggaaatcctgagacaatccaaactgtttctaaggcaatgcgttgctctccaaaaactgacagtggggctacattgctgaggataacacctacacaactcactaaacatggagaagttgagctggtacccacaaggagccttcactctatgttttagtgtctttggtgcaggcagatactaaaagagaaacataagcagcaacccagccacaaaacctttgacctacaatctgtcctgcctacaaaatatgctgtgacaagggtggtacagaacttgtgggagtagtcaattaatgtctgatttgacttaaggcccttgacatcaggtctgtacagaacattgataaaaagtgtctcttaggaaggtgagagagaaattagcttgatgaatgtaaatcctgcaaagtgaatctaagaaatatgcagaaaacagaactttagttatgggagatggaatgagatgagacataaatatttccgtttgaggtctgacatcatcctatcacttcccaggggacgaggaccttcctgcaaaaacatttcaccataaagggtcagcttctccagttcttagacgattatcaaccattttaaaaaaagagttgggaggtcagggtgagcacgaccccacattgcctcttcctttgatcaagcaggcagatgacacaaggtcctctccaactttgatttgaatgggaggcatctgagcagcttgttatcatgatgattcggattcagtgttgtgttttgtcggaggaggtggcttcccagcagaggacagtctgcatttttaatgaacagccagtgatgtcagtgttgtgggtcctgagacttctctaagtctaagagtaggccatgtgagaaaactggggagcaaacataagggtgtggtgagaaatcttaggagtgacagtggtatgtgtatgtgtaagcaagaggagggaagacggggaggggaagaggaagcaaaagagagataaagttgcaggtcaacacaaagacagatttgatgccctctttggcagtttggcgtttttattaagagaccaaaaacaagctaggcggtggtggtgcatgcctttaatcccagcactcaggaggtagagacagatggatctctgagttctaggccagcctgatctacagagcaagttccaggacagtgtccaaagctacagagaaaacctgtctcaaaaaaatcaagagggggggtagagagggagggaaggagggagagagagaacaaataggaagggcaggaagagtgggaacatttagctgttcagcatcaaactgttggtgcctttctagtctagctttgctggatagcttccaacattctctgttcttcctcatgtcctatatgtgtacatcttactcacttttcttgaaataaataaatgtccattttatttttttttctgagacagagtcctagtctcactacatattctaagccagactcaaattcaagacactcctgattagcccctgattatttagattattgccatgaactacccctcttgtgtcattaacattttcatattttcaagggttcattttttgaaatacaaagaggatctgtgggtcctttatgttctttgcaatttcattagcatctagcacaacacagtccatttacatagtgtgcattagacaaacatttggaaagatgaaaccatgcagatggttgtatggtccaaatcatctggacctttcagaccaggtttaaactcaattgttagggaaatctagttccaaagccatcagaaaatattgatgtagtaaactgaagggtaaaggaggatgaaatgatgagtagatgtatttgtttagtcaatttaatcaatttaatatgggggaaaacacattcagacaacctaaatgaggaaaccaccagataatattatgaataatttttattaaacacttgttgcgtgtaagacctggtcacaacacacaaacaattttatcttactgaagtttcattaaacaatatgaggtgagtattaggatgcagacactgtgctaatataagttgataattttttaagttgctaatgtgagttcagatgtttttatagataccttagaaacttaaccttgtagtccctcattcatgagcttggaatccaaaccttgccttctttggcagcctatagtgccagcagggcacaatggtctgctccactctggctgtatcccaaacacccaccaggttattgtttggcatatagtatatatagaaagataattgttgagggaatgaatggccaacccattcccaattggaaattatgtaccctttgtatttatcgtaatgtatagactgcaaaacatgtaagagtgtcagatcccctagcactgaagtcacaggtggttttgggccaattaaatgaatgctggaaactgaactccagtcctctgtaagagtagtaagcattcttcattcccaagttatctctctagtcccaactttggttttcttatttaagttcaatgtccatttgtcatactgtcttttagttgaaacatacccccttgtcaagccttttgagaaacccttcctgcccttggtaggagggacttccatcaaggtcctacagcattcattgcataaaccacaaaaaaatggtcaagtattgtgggttctaatgtccttttccttaatcacttatgctgatttatcagagtacatccaaactaagatcaggcacagcaacactagatgaagcatttaatagggacttgcttcttactaacttttgttgtgatagtgaaaatgtacaatttcacatttaacaaaagggtatatgaaatgattcctatgtttttcctgccactttgagacatataaatttgtcaggaaaatgaaatacatgagtttatcctgggctggctaaatgaaaataaaatctagattattgtctgaaaaatacatgtaaaagagatgattccttgtccaaccttgaggtacgttctgaaattttgtgttgtgttggaacaatgcctctcagtcattgctcagtatctcttctactggtacccaaagagccttttagaaaagtgttcttaggaatgtcattcatttgtatcacatctatattgctcctgcccctttctcctccaattcctcccatagcctccctctctctcccaaactcatgattcttctttaattattattgttatgtgtttatacatattgtcctttgtttgtcaatacacaagagttatcttacaaaaggaaccccagctgagaaatgtctctatcagagtggactgttggcaaacctgtaagatattgttttttattaattagttgattgattgattattgatgtgtgaggtccccacccatggggagcagtaccacccctggataggcagtcctgggacatacaagaaagcaaagtcagtaagccagtaagcagcattcttttgtggtttctgcttcagttcccaccctgatttcttgtcctgtcttctctcatcaatatactgtcacctggaggtgtacaatgaataaatcctttcctccttttggtcatggtctttattataacaacagaaaccacccccccaacacaccacacacacaccataaaaaccacacacacaccacacaccttactcataccatacacatacaccacacaaaccatatacacataccacacacaacacacacacacacacacacacacacacacaacacacaacacatacacaccacacacaccacacaccatacacaccataaaaaccacacgctcatcatgcacaacatatacacgccacacacacacacacaccacacaccacacacacacacacacacacacacacacacacacacacacacggtattgaatctatttttattgctcgtatgttcttgggtcctgggttgaccaatcaggattggaatacctatatgggagcttgtccctggaggaaaccaattctccctcttttaacatccattaaccacctgagtctcttcatcaaaggtgggaatgtgtgaacttttccatatccagagagcttttgaaatacattgtcttaaagcccacaggatggaaatttcacagtcttactaaaaaagttatgtattgtatgtatttctgtgatttgtactcattaagagattaaaatgttttttccctcccctcaagcacctttttgagttgtgtttaccatatggactaaaagggtgaatgtcatgagtcaaattatatttaagaaacatgtaaaatgagatgtgtggagttggatccacagctccacagttaagaacattcactactctggaagaaaatgctggtttagttccagcattcacataaaggcttacatttatctgtaactctaggagatccgatgtcctcttttggcctccatggagagcaggcaggcatgcaatgcacatacatacatgaagacaaagcactcacacatataaataaacataaacacatctttaaagtgagcttgtgtgtaattttagtgatctgtgatgtagtgaaggtcaccatccatacctctatatcaatcagctattgaagtaactgactgtaaatatgtatcaaagtacatcatcatctgattgaagaactggtatcccattcttcagtggagtgagcttactggcactaagctgagtgactccatgtctttgcctccattcggccaccttatcatatagccagtgagttaccaacattgagagagatgaatgtctacattaacttattgcaatttgaagagtctagaatactgaggttactaatacaaatcctacttccacctcagtttaaattattaatcattagttatatgataaatttgtatttattgtccttgtgcaggggtcatgctaatcttctctgtatcgttccagttttagtatatgtgctactgaaggcagcacaaatttgtatttatcaagctattctccttatacattttttcaaggttttctccctccttctttgtactcacaacataattatggtgagttgttttaaaacctggcatagaggtgcagacaaaaaaatgaaatgacactttgaatgtttaatgcttagtccaaaacatgattgttacagaaggccagtagctccttaattatgatttactgccagtgtattttgaatttggaataaggggaaattatcaattaggaagatagcatgagatactggaataatcaagaagtatcgagaagatagtgaaatagagagaaaataagatttgataaagtcagagatgatgggaactttcaattcattcagagatgaaagaagaggagagaaagcatggaagtgtctgagaatttgctttgggtaactattgtttatctggagaaagaaaggtctcaaggtcaaactacctgtcaaaagaaaatctcaaacataggcccttgggagaatgagttttagtcagccaggctggtgatgatttggaccaggcaatcatccactggtacaggaaacctggcagacttgtcacctgcaggcttggcatgagagacatcaatcattgggcttaagaactcagggtaagaggtgacatctggaagtgggctttcttgggtttttgtgtatgtgtgctaggaaattgattgcacagcctttaatagtggcaaccaacagaatgactcacaatgaagtatgaaattgggcaataaaattgagacctcttagagatttgaaatgaaataacaaaacacacaaaaacaaggacagagtttggttgccttgtgaagctggatcaagagaaaccatttgacaggatccagtgttttgcttaattcaagattgtataaacacataagtatctctcccaaggcatggattatgcaaaacaaaaaaatgttaaatatgcttaatggagcagacactgctagtgtgtaatgaaatttattcttctctagctcctcagtagccaggcccacagtttagtcagagaggcaaggtgctctgccccaaggactgagctggcctctgtgtaagtcatccatagaactctttttagttatgttttcatttcccagcagcctttgcagctaggtgatcatatgagttggttctgaccagtaacctgtcattgcaaagtttatttggcagaatctgaaaaaactttttcccactctcataaaaatgcagagaaaagacactctcccctcatgtattttgccctgcttgggatgatattgtagagacgtgctggatggtttgtgaccctgagatgacacacaggaagatagggctaatgtagaaaaactgatggagcataactatttaaaagatatctcttttctttttttttaagcctaagttttaggtgatatttattcagtttctaaatcagggcttgagagcatgaataagatatcataggtcaaatgttacatgggaaatagaacatgaaatattccaacttgagaagtaaggagtttctctgttgaggtcagggcaggctgtttggtgttgacttgcttccagcaagataacaaaggcattgagtatgctattcttcagccccttgacagaggatttttgttgaggcaccttttggtcatcttttgacatagacatacagacatagacatcttcttgagaaaaaaaattatgagattaagactaacaaacttgtcttcctgagctattttattccttcaccccacctccttcaatccccacctacccctcatccacctctgccagtttagtagcaagtaaatggacagagaagtgaaactctcttaactaattcaatctcaccaacatttcaaccattattagtctttggaaccttgtgctattaaaatgtcctcatggttgaagcctttgagagctggctgcctgttagttttagctaaaagcattctaatgaatgctaacagaaactcaagttgggcgagttgtaaagtggataagggtaccagggtctataaagtctcatcttgtgtgtctataatgacattcaaatgaaagcttactcaatgaacagagttctaaataatagaggaggaaataattgagatggcgaagctacctcctgccaagtctaggcagtagaggcagtagaacttcattataccagcaagagagttagaaggcccagttttaaaacttgcctttagtatctactagttggctgttgtcaactatcttagctatctgacatacagatgagttattggtaaaaactaaatgatatttcctcatggacttcttatgagataacttcaggcatcaagtattcatgtagtgcacgccagtgttttggtcagtgacagttcacatatacaactgtggtcccagatggccataatggagatgcctgtcacctaaggacattgtagttatcataatttgttgttcaacatgttattcccctcccccaagacaaggttttttttttaagttgcttaagttgactttcaacttgtggttctccagctctgcattggcacaactggttaattactcccataattgcagtgattatggtgtgaacaaccttaccacactgctaggtatgtaaaagcatagcccatatagccatataaaaaacataatacttggtaatgtgctgtgggatttcaatccatttagccaatgacttttggggcagaaaactctaaggtgtggtctttgtctacctatgtcacaacttaaaagatgaggatgagggtctcttgccctcttggtctcgtgctatcttgggtggtgaagagtggatcagggggcatgaagcagcatgtagtcagtccctgagcaaaaccaaaggactgtgcaactggatgtgtcttgtcctgtatccatgagtctgtctccagagcacccccttaatatatactatgtatatataagtacatatatacatattaatatatatatgttatagtaatgagaataaattactatattactgctttatgtatttacaacacaagattgatatcaacagtttagagtggactgctactgatcaaaaatagtgtacagtgaagctgttctattccgacaggagcctcacttgtcttgtgtttactaaattgtcttagttctattgccatgataaaatatctcaactgaaaacagcttggagaggaaagggtttatttggcttacactttcatatcacactccatcactgatagaaggcagggcaagaactcaatgcaagaacacagaggtagtaagtgaagcaaaagccatggaggaaatctgcttactggtttgctcctatgacttgttcagcctgttttcttctacagcccagggacacccacccaaggatggtatcatgccctgtgtgctgggcccactcacatcaattattaattaaggaaatacactacagacgtgcctataggtaatctgatacagatatgttatcagttgaggttcctcctctttcccagtaactttgcttgtgtcaagctgacagaaaacaaacaaggatacacacacacacacacacacacacacacacacacacacatatatattatatatatatatatatatatatatatatatatatatattctttatggcatctcagtgtcacactggatgtctgacctatgccatcttacagtgtagaaatatactaggtggtgactacacaaggtaaattgtctaacggcacttttaccggaatgtgcccaaactgttaatgtgtgattgcattaaacttatagtgcccagaattcattacgttttgagtggcaaaaagtggataatgagttgttttcaatttgtgatgaatacagagcattttttgatcttttatgaaaatcacttgaacccatttcaacttacgttccagagaaaaggtttggactacttacttttttcattttgttctatattttcatgtctatttctaagcattctaagaaataatttcagtaaacagggaaataaaagggtagaaaaatatggggatgtgacgacttggcaaggttagtccttttaagcagaaggagagctgcagacaaatgctgtgatcaccgtagctgtggctctatcctcacaagatacccaagggtcagggagtgtctgaagctctagatttgtgcttaaggacaacaaggacccttctcctctggctcatgtgtgtgcacaccacagtgtcacccaagagactggggacatgagaagggatttctcatgtcttctgggtcagggcgctaagtgtaaagccattgtgcaggttattttgacattctagaatggagatttggtcaggtatgaatggaactatgggaaccttggggaaacttaatgggcaaggtaaattttagaagacttttgatgagtctgtagttgagatataagagggaaataagaaagggaagagcaatactgcatctccaaaagtgaaggctggctgatacagtggaagaaattagtaaataattttggaataggataaatgatggcaaaaggtaattcactccaaccctgtggggagccacagccccaagatggcgcctggctggatgccagggagaccgagcttagctgtaaacaagccttatttggaagcgcttagtggatctggtgtgcctcctccagctgtgacctatcagggatcgccaggtggcatgagctaattgggtaatgagcttgcttttaagggcttgccagggggctgcgagaggtagaagcagagagagaagctgaggtagaagtagaaggagaagctgatgtacaaggttcctgaaaaaactgcttgaagaagagtcgtggtcgtgtttctcttgctggtcgagatagacgcgacacaaccccctaaatcatacattttctcatgcttaagatttatttctcccaaggtagatatcaatctcattataggggaaggacatcaatggcttctttcccaccacagcttggattcttagttggggtcatcgctgtggatcccctataatgagattgacgtctaccttggttaccattcctagagccttcatccagtagctgttcaaagcacccacagctaaacactgagccatactcctggaatccagttgcggagagggataggggatgagcaaaggagccaagatggggctggagaaaactgcagaaacagttgacctgacctagtgagagcacagagaccctagtggtaaagctggggaaccagcattggactgaaccaagccctctgaatgttggtgccagctaggaggccaagacagtctatgggacctctaacaatggagctagtctttatccctagagcacaaatggactttgggagctcattccctatggagggatactattgcagcccagatacagcaaggagagcctaggccctcccccaaaatgatatgatggaatttgaaggtccccagtggaggacctcactatccctggggaggaattgggggcagctggtggggaacttaggaggatgggagggtgagggaatgtggggggtggatatgtaaatatgagtagtaattaaagaattttttaaaaaagacctacatgacaagtatttaggcaaaatgcaaaaaaaaaaaaaaaaagatttatttctcccaaactggcaatgttgatgcttcccctcagttccccagagtagcaaatttagtgtactcatatccctgaacttgtttgtgcttttccttagtgcagatctataggcttccttggcagtctgtatttcctggtttcccggtaatccctccattcttcccacaactagcaggaatgcaggttagaccatgtgtggtagtgctccaggtaatggaattaaagaactatctaccttacaacagtcctcatgccagagagtgagaggaactcagagacaaaaatactgcagtatttggaaataactgagtgaacgaatggcctgccctctgtgaaaacagctctgcccacaaagcactgtcatcggcaaaggatgctggctttgccagagaggcctgaagaattacagggcagatggagaacagacatgggaaagggtccttggcggtgaagaatttcaggtgaatctgtgaatacaagtagccacattcatgattcagatgaggcaagcaggatgatgtctcacaggaggaaagggcataggtaagtgtcaggaggcaaagacaacagttgtacatcagcaataagagctgggcagtggtggctcttgcctttaatcccagcactcaggaggcagaggcaggtgaatctctgtgaacttgaggccagcctggtctacaaagtgagctccaggacagccaaggctgttacattgggaaatcctgtctcaaaaaatcaaaaccaaaaccaagcaaattaagttaaaagcagatatgtattctataaaactgagattcctttcatgggcagaggtaaaactttgacactggggttatgacaggtggaattcctgagacaggataagtaatggctgtttatagtgagcttgatgaatttgaatatttctccagtctgtatctagcagcagcctaatacgtggtgagaactgctaaattttactattggagtctatatgcttagtggtccagagagtgggaacctcatgaagaaagtttcatttttttcctttcttttcttcattttttttttccgagaaaatgattctcagaggaggaattgagaattttgaactgtgatttcaaaccaggtgaagacagcacttgtgaactgctctagtagagcgtgtgtcagtatccagcacctggcagcactgggggtgggcaggtgcgaaggcacacactatgacatcaggctataaaattagattcagatcttggagagcttcgaacctcctgctaatcaatactgcatccacagcaacagatgaaatgtgagcctgggtgcaaataatgaaagtgagatataaataagggcatgtctacaattaacagtaagttcataagatttactttcacagcaggcttagcaggtgggtgaaagtgttatgtggaattctgcaatcccagagaacatttttttgaccgatgaagacagaaaatgttcaagcagagtgtaacaaattgaacataacatagtggttacacttgtgttagtgctgtgaggaaactcttaactcagagactcaaaacttctgaccaaaaccagatatttgccaaatggaaaaactgtccatttatttttgcatggctccatctaaaaaccagcatgttaaataaagatcatttaacatacaggttgccagataaagttgtgaaataattattagttgccataaaggcataaggggatcttggagatctgtaaattgctgatccacgctattcaaaatttagctcaaccaaagcacatgcagtgcaggtaatagtcccatccagatagcaccactcaaatcccctcagctgctacacaagacataccactgaggttctcttaagggcattcttggctctagggaggttaggtggctgtccagatccaatgaccagttggtacaaagatagaaaagcctgctcctctttccccacctttgtaaaattttatggaccagttttactgagctacaaaatgattgacatttcattaaacatcacattactgtttgaaattattaactgtacgaaaactattgtgtgtaacagggcaaaagttcctccatctttctcagctggagctgtctttgatttaatctggagcaaactgtcctctccctatccccaccctccttatctcactgtgaggggtctcatgagaaagcacccaagcctgttctagaaactcagggtgaagatgttccctcctaattgcatgtttttggcttctgttaaactacttgcttgctttagttcctcttacaactgccaactaggttgtagttttcctatgttcattgtctttaaaatctccctgtaaaatgtatttgaagatgttctttgagtagtatttctctccaggcagattttgacctgtttgatacagactctcagttcccagttttgtcatgctgagtggtctttgggtctctaccctgcaacactggagacccagagagaacaacaggatggaatgaaggagagagaattccctgtctctctctggctgcttgaactgggctctcactcttgtcttgcccttattagctccatcactgttttcagttctcagacctttggaccaggactgaaaatgatagtgtgctgggtagttttatgtatattcaacacaagctagaatcatctgagaggagggagcctcaattgagaaaatgtctctatattaagatcagttgtaggtaagcatataggaaatattttcaaaattagtgattaatgtgggagggatcagcccattgtgggtagaaccatccttgggctggtggtcctagggtccataaaaaagcaggctgagcaagccttggggatgagccagtaaacagcactccttcatgacctttgcatcagcttctgcttccaagttcctgtcctcactgcttttgataatgagcatttttagggaactatgagtgaaataaatgctttcctccccaagttcactctcccactggaagtgttaacctacttaatctttatcagtaaaaatttgggagccagatatggggtaagaacctgaacgatcagagaaggagggaagcagctgcctgttacttcctacttctaccattcctgtatccaaaagggccgagattctctttttgccccaccttactacttcctctctcctctctgcctacagtcctccaaacctgtatggttaattttggacagctagtggctggctctaccctctgacttcaagcaagttttatttgtcagaatgcaatcaaaatatcacacttcccactttttgtataaataaaaagcaaaggttttaactaaaatagtaaaaatatatacaataaatacaataactatatacaaattatacaggcaagaattacattaacaatgtccagttcatttgcatttgacaaattcagagaaaatactccattatctgttttatcttggtgagttcaaagtgttgtgcctaattcactttctatcccaacctgtattaccaaccccaaattgtttttatgtctctcaatctacatactttacacctcttttgtgagtttctttgctggatttggtaacaaggaaaactataaccacaactatataatctttgactccattagagacctgacaaggatataatattacctgagtaaacagaaagtgcagagcaaataacttccaaaactaagaaatgacagaaacagctggctgcctggacagtcacccaagtttcctctgtaatgttggggcagccgtcttcttcccacaggcctagaatatctgacagacttttctgtgaagcaggatttttgaagaactatcccaccttgtcttggcaaagttcaacagccacttttttgtggcctactcatccaatttggacagcatactgtcagcagttgaggtaagagcagtttcttgcccagtggctaacttttgccacaaagaaagcaaactccatataaagttgcttcaatgcccatcattttctctgaagtagagtggcacttcaaggtgcaggcatgtttcattgtcataagaaagaaacatgttattaaaacatcttatatgccatattctgtagatctctgaagctcccctacactgacatttccaattcagtctttcccacaggtaagccagcctatgacaatgagtcctggccagactcattgtctggccagacaatttctcaaagaatgaatgccttctgtatacaatttatttttattccaaataggaggtgaattgttcaagaaataatgtgtgagttttgtaaaaattttaagttctaaaaaacatatttgattatagaccattgaagataaaaatatctactaaacttttctgattcttcccatgtcagaataacttcaatattatagtattgattaatatattaaaaatgaaaaattatagtttcttataagaatatagatacaaaaattctatatagcaaacagaaattgattttggctgtatattaaaagaagaatgtaacatgaacagtagaatttactctgagaccatgaggattggtttaggaagtctattaatataatttgttacatcaacaaaggaaatgaagaaagccgatgattatatcaataaatgactgcaaggcatcataaaattctcaaggtcttcctaataaaaattccaagaaagttagaaataaaggaaactatttaaatacaatagtatctttttaccaaaattcaatagcaagtactataataaattataaaattctgaaattgtttaattaaaaatagagttaattttcagttaaaatgactatttagtgacattgatcacacctttctgactcactgacttaagaccctttccagtgtaataactgccagggtgtgtttagccatctttttccccaagtgcactgggacttcaggcaaacaggtgcatgccttgtggggttttgcattctccgtctctcacaaaaaaaaaattcctgatggcataaacagttggctggatatgatattagaattttgtgctttataaatggtactttgtattttcttccccacaaaaagatatgccagtttgatttatgtacaagatgctggacttaccacatgacaatttgcaaaaattgtttccaataagtccatccaaagaattatatctgtatctaagttcagagacttaaaagaccacatcattttgattttattatacagcatttttgagatatgaaaataccacagagttcctaacagcagcttttaaggatctttctgtgactattctaagaatagtcacattcagaatttgagctgtgaaaaataatactacaattcactaaaattatgtttatacacattagaaaccccaagaaactaacacaaaaccccaaaacaaattgagaaatgtttttctaaaaggaatttaagttttctacccctcctatccgctaaaacaaacctttcctataatatacctttaaagttacagaggacatgcatgtacttctctagagccaggaattacttgacttggtgttgatagcccaggccttctctgtgcatttggctgttatctcttctgagatgaacacctcttgctgctgtcttctttcaagagttgtttaattgaccaccctgagatgtggtcagttaatacagggtgatgttcaggaacccacactgcaaggattccctatccctgagttgaaccatttttgtatttattgcttaagaagctcacaggctggagtaaacagagtgaaagggctaagacctaacaaagcatctcacagctccattctcttccccatcctttcctgtttccacatccttctcaatgctgttctttggagtgacaaagacacataaaattgcattcttaaatctccctgagccaagtaatttaaagagtggtttagagaaataatgtttttctttatttctttcctcttatctctctgtcatctctagctatcatttacacaccctccttccttttttgttttaagaattttatttattcccatgtatcatgtatctgtcatccatttatctattttgtattatttatccatgcaatctctgttggcttagtctctaacctcatattctttccatgagaattaacaccctgattttctttggaaagccctcttcacttgctagcttgtctggttgatggagcctggatttcttcttcagcttcagaaggagacatggattcatttctgtctagtaagaagaatttctgaactgtaggtggagttattacagttactttcatgtggggctgcaacactggcagagcttaatcctggagttgcctccagccatcttattagacgaatgaagaaattatatagatataaaattataaatatggaaaatgaattgaatgatgaaggaagagacagtcttgatgagaacatttgaaggcttgacttcaaccagaattgaagttcacttagcaatgaggaaaaatcaagttacagaggagttaattctggcttatgattccagagcaagagtctataatggcaggggagctaaggaggcaggaacaagaagctgagagatcacatctcagctgtacacaggaagcagagagtgggcacaaactgtggttaggttataaaaccctcaaagctcatcctcagtgatacacttcctcttcaaggctgcacctcctaaaataacttccccaaacagcatcaccaactgggcccaagttttaaatacatgatcctatggtctcatttaaaccactgtagtcattaacacgagtgttgagcagagatacgaatgtgagagacatgaatgcccctaaagccatgattggagatgaaattttctggactagatatgttaggcaaggaatataaagatgagatagactccagatgcacacctatatgtgtggatgcctggagatatattcatcattgggttgagtcaaataaaaatcaccccagaagatgacttagagttacctagaagggtcaaagcaaaattaggggtataggacaactcagatatagaaactaggttgtgtgttgaggagaggttgatgaagggtaaaacaaacatgctataaagggcggggagattgtaagtcagggagagctatcatttctatttgtactgaatgtatcatgccagatttgttattatggggaaatacaagcttgaggaaaaaagaaaaaatcttgagaaattcttgattataaaaccacaggttaaggtttcagaagactgaaaggttactcttcaggcaaggaggagaatttgtagagctaacagaatacttctgaggagatggatgagaaagtcagagagctctctagctgatgggacactttcccagaatatcacaaatctgaaaaaatgaacaaatatttgtttaagtgactggtataattattatacctgtgctataatttggagatgaaatggttcccataagctcatgtggtatgaaggactagtctctagccggtgttgttgttgggtaggaatggaaactttccagtggttctcaactttcctgaggtctatgacccttgaatatagttcatcatgctggagtaactcctaaccataaaattatttctttgctacctcataactgtaattttgctactgttacacattgtaaaaatctgatatgcagtatatctgatatgtgacctcaaagggatcatgacccacaggttgagaaccactgttttaggagatgtagcttaatagaagtcaccagggaatgtctttgaaagattcattttgtccatagttgtctatctctcttgcttctcctgctcctcttccttctcagtctctttgtctcttgatcggccttcctagctgctttgaggtaagcatatttctttgtcttgccatgctgccataacatttctgctttgccacaggtataaaagcaatggtgatggcaggccatactctaagatatttggaccataaaacaaaataatatttctttttaaaaaaattttatataggatttttccccctcagagcaatgggaagctgactaacaaactggagaaggtgtagaaagagagggaaagcaggtgagaaaaaactggaactagggatgaaaaagagacctggaatcttggtggatagatgtggggagaggtctactaagtgtacatctgggctttcagcttctcatctgtagaactaccttgagctgtagtgttttactctacaaaaacaagggcaccaatacttgttacttcacatcattgttgtgtacatgttcctggcacattgtagttcttggaggacactttacagagctcatgaagcacgtcagggaggactgaacattcataagctgtagagctgaggagtgagagggtgagtaaggcaatttatccaaggacacagttacaaaatatcacaaatgatgtctgtattctctgaaatactgaagatgctgatgggatttagctacatggatggtgttactaatcctggaaaatataattttaatagaatggtgtggagggaacccaaagatgctgtatttatttggaagtgactagataggatcaatgataattaaaacaaaaccttggctgtgaaaggcaagagaagaggaggagagagggagagagggaagaaagaggagaaagaatcagaacagtaacagcataggaatccagggcagggaggaatgactgtcttaagatgggagaaatctgagctattccatctgggtgggttagaaccttacctcagaggccgcccatcactcagagtcatggaactgtctcttctaataaagactatcctttgatatcacaaaatttgccttcgtagtcctttgctctatattcctgctgtcatttagatttaaagaacacagtgaagacataaaaagctcagcctgttgggaagcttaaatttgaatctcatgctccgagaggcttattaaattgccatggttataaactgagccctaatccatgctacaaagtctcctgtattttcttcccaaatgcatagaatcttcttcctgggataattactcttcaatagctggaggcatcatcaaaaatcaagataattacccttaacaggaataaatgaattttgagtgtatcatctcctgccacttaaggcagagcaatggaggttaacaagacagggtgactcttggcgggggaaccacatataagtcattcctaattgggagtttcacctttgttctcccaagcagctgctagagaactttgtacatgtgacttgagataaatgagcaagtcagggatgtgtttgaatccttgagatgaatggcttggcgattcctttgaaatccttaagaggatggtagtgattaaaattacattttgaaaaaaataactcagagagttcagaagtcttgaaggaagagtcgtggctcaaagaacctcatagttagtggttctgggattctgcagctcacttttgttcattctacgggaggctgacatggaagacacactctggggaggttaatatggtagtggtgagggatcagtacccgggggtcagaagaaaagaatcgatgggaagcttcaaaagggaaaccaagaagatggtttctctgtagccacaatctccttccctcttcaatgggagagagaaagataaatattcctatgtgagtcttgtcaggtgactctgcagcaccaactctgatggagaattgtggttctgaagttacagaacccccatacacatttctgagggtaattcagtgatttcagggaagcattgtgtccctcagaactctctactttccccccccacaaagtggtagaaggaaatgaccactacgaagatggatggagaaatgtatatgtaagagagttaagagaactagctctttgtgtatttgcttggagaattttatgtgccacttgattacatggaaacagaaagaatgggtatgaaatccagacatctcaggccagcatgtgttggcagtaatattcttatataaaattttggataaacacttattatacactagctttcaccccaaatatttggttttcaatttcttaatattttggaatgctggaaattactttttggcatgcctgtgattcccgggatacagctttctgctgtttgaaacagaaatggtttcagcctcaaaataacagttcctgctaaccaattcaaagtcttccaagtcacacagactgtcagaagccagagcccagttttttggccagggaatgtatttgcccagttcatgaggccgagatcagacctgggtattatttttcaggtcccagttggataagagacaaagaatatctgagtgcataaggatgccttgcgaataacaacctccatcaacattttcttaggaaccatacttttgtcctttgaacaaaggtcataggtatattttcatagactattttctcccctttggaaacttcatgattggcatggaggatgccacatatttaacaatcagaagtgttttttaaaatacatgatgaaccctttacatatgatgtctgaaagaggctgtgagatctagcatcaggaactttcctagttaaaatttaattactgctatcaattttgatctattatgtatataagaggattgacagttcatgaatttctgagtagattcttctgaactcatcttgagttacaatctcagctttagaatgctttagtggcattttttaaatgagaaacagtctgcttggacatttggacatctgtgggccaggaaggggtaaattcatgtgggaacacctttccaaatagtgtgacaggtgcctgcttcctgggatcctgatgtgccattgtgggcacatacagtttcaggaagatactgaatggtacagatttgattgaaggtgtatatgattgctttggacaccaagaagcacacacacctaggttactcagaaagtaactgctaactcagtggtcagtaattatcctagcctctgatgacaaatgcaaatgcagacattctttcaacttggcaatatttatttttgatcaaagtgtttcacttttgattaagataattttcctggaggcgctgcctgtgtgaagtaagtctcaccatccagaactaatactgaaggttcctctgatcattattaaagtgtactaatgaggccctgaatatgaacactgcagatgactaccaagttgggaccaagcttctaaaggacctctgtaccctgacagttaatatttgtatgtttaaatgttatcacaggtttgtttgatcccacatatttattatatagtatgtaattattatatttatgaaggaagtatacataatttctttttttttgcctaggaaagagttaaggaatacatgagggttaatcacctaatccattatctttgtgtattgttgattaatgggggcctggagagtgaagttacttggtcaatggtactattggctagaacttaaatcaggtctcctgttgttttgaattttgtgccacatcttggaaaattttatacaagtgctgcatttcactgcagcttcacaatggaatagtttctaaaatgtagccattcttattatatatttttcctagtcagtcatcagcactcatagcctggaatgttttctttcttagattcccaccttgtcagaaaggcagccttaagttcttcgttttattttatgtgtgagtgctctgtctgaagtatgattttatgccaggaatgggcattagatccccctatagagggctgtgagccaccatgttgttgctgggaattgaactcaggtactttggaagagcaaccagagctcttaaccactgagctatctctctagttccaacacctaaggtcttaaggttaatgtagacttatagtctgggaataaactccaggacagcaaactaacttgcatcaaatttggttcttatctatctggctttcactttggttaggggttgactttacattaggccttaaatagtgttcctcaaactctaggcctggaggactatatgagggcagtcagcatgatcaccagctcagaccaagcccagtcttcacatttgtcacaaggacaagggctacttatccactttgtaatctggaagacatggggtgaagctgtaaatcacgtcattcaggccacggttttccatctgtataggggaatagtatttgtctaaaaagtggtgatatatggaatatgaagcaggcctgtctaaagatggtcttgtaatgtcatctctggcacatgctggctgaagttcagagccactgtctgcacctaggtgggcaagacagctgcttcaaatattgaaatctcatgattctgggagcctcctcctccaagcagtgtataggtggatgctattcctctcacagcttactgggatctttaatctctgggtagctagatttcccagcaagagttgtgaacagagagcaaggcagttcagatcacctggtgtgcaggcaattgggatgcatctagtgcttagcccagattgagaaaaataccaggaatgggaatgcagtgccctctgctggagcatgaccccttcattggctctctgttacctcagtcccactggagcttcaaaccagacattctatagaacactaagatgccagagactttgcatgtagttgccctggcttccaagtgatgcctttgttattaccccatactcttaaaatagttgatttctttttcttttcttttctcttttttttcttggtttttcgagacagggtttctctgtgtagctttggagtctatcctggcactggatctggagaccaggctggcctcaaactcacagagatccacctgcctctgcctcccaagtgctgggattaaaggcgtgcaccaccaatgcccggcttaaaatagtagatttcttaaggattaaatgcactagtacataaaaacacccaaggactcccagcctcccaatgaaaaggacaccagcaaaacaatacacttacaagtagctgtttctatcattgaatcataataaataaatgagtgtcattttagcacatatcacagaacagaaaatatgaagtatgtatgacagtaaatggtgaggctggggggttttcagttcaattgtcttttcctctttgtctttaacacttttagttttgaaaggcattatgaaagatagaagaattagacttacctcctgtatcttcagggtgggagatgtcttttctccacttgcagtaagtaccaaaaaaaccacatctgtgcctttccacagttagttgttaaaaccccagttttccccctcactttcagatgtataaatatatctttatgtgagctaacataatctcaatatgaatatgagaagaataaatttctgttaaaaataccaccaggttgctgctgcctagaataagaaatgatatgtcaataagactggaacatgaatctcattatctcaagtcatgcatacatgagggcttgaccatgaatttagcagtagggaaaacatccagttggctgtaattccatgggtggtgcccacagaagccagctggccttgattcccatctttcactctctacttgaagtctgttcattttttaaaatgtgtttattatgtatactgtgttctgcccgcatgccagaagagggtacaagatctcattttagatggttgtgagccaccatgtggttgctgggaattgaactcacaactcatggaagccagtaagtgctcttaacctctgaactatttctctagcctgaagtctattcatttctatttacaatgtgtcttatgtctttgctttttaccaggatcctttctgctgtttcaatctaacattacctttcagtcagactgctccaggagctttctgccttaactttgcactttgctctactccaactaattctctatgtccatcagatttggtgtcttccagggtccagtagcctcttgctatacttggagtaaaatccagacttatcaaagtggtgacaacagtcttcaagaactcacaaaattctcccaattggtgctggaaaatgcagctaccttgacatttctttagtgtttggaaggcattaaacactaagaacatatgtacaggctcatcttcctcacaggtatcctgcctccaacatcatttcctctttgactcttagcccaaatgatttttctaacctatgtacacacacacacacacacacacacacacacacacacacacacacacacaccacttaacgttcccacacattaaataaattcctttttattttctctttgaacaatcttggattttcattccatccataaatttataatggaatatgcaaattcttctgtaattgttcatgtgtctcctaggctgcttgggtgttgtaatgaaattccattccctgggtggcttgtaaacaacagaaatgtatttcttatagttttggaggctgggaagccaaggatcttagcattagcagattcttgtccagtgaagacccactttctgcttcatagatggcagagtttcatgttctcacatggcgaatggaagagttaggtgtctggatctcctttacaaaaggagtgctttcactcatgaggactggataaaacctccacttgttatggccagcaccctggcctgaggattttagcacatacattttaggatgaaatttaggtctatgggacctctaacctcaatggacaagctgtaagggaacaagtaccatgttttttctgctcaccgattacttagtagattgcacagtgcctattacgaagtaggattcaagaaagattggtaaatgaatctatgtacacattaatttaaatgcagtatgattacattcttacaagttgaaatagtttactagacagtaaagattcaggtatttccattgaaccatactgtccagtgtacagagggagcagtgtgggacccattatggatcctgaagttgagatcaatcagagctcagctaacttactgaactctgatcccatctttaccatcatcaaattgagaaagatggggaaaaaatcacagaactctttcccatctagaattctggggatcaagtgagacaatcatgttagtgttttgagattgtaaagtattcaaacaggctcacattgttgccattattaagtgcaaacttctgtctgtatgcaggaaaggaaggaaaggcaggtagactaataagaagagacaaatggctgctagtcgggatgttgctggcaaatgaatagagaactcttctgtccatccttttatgttccagagcttgagaaaagccaagaagaaagaattcatggagcattcatcgtgtgtgtgtgtgtgtgtgtgtgtgtgtgtgtgtgtgtgtgtgcgtgcgtgtgtgtgtgtttaggctgcttacatctttgggaaatacccttagaaatatgtccttcttgattgacagcagatgttatctatttttgaattccttaggtctctataattttgacacaaacattcagtgcttactcttgtcacatttcatttcctgtcttatccaattttcctttccttttgtaaattatgtgcaaatttctaaacctgtatgaattcttttatgatgttaatgactcattttcttatagccatttaattctgaaattcacaattcatcatgtgatttaagtaaaagttataaaaaatccattatcatctgtcttgttgcatttattttgaattattttagctcagggggtagctaagctttagtgacaaggctcactagtgacattttttgactcctgatttcatagtgtgttatataatgaccacctttcttgattttggtctgaaatactatacagtgtcaacatgatggagaaaacacctttgattttcaagtaaataagacatcacagagaatacagcactttatcatttaaacattgtggataagagaaatatcctcactttactaaatatgaagttagggtctttaaagaacatgtgtacatttggttcatagggtgtatttcaggtatgcttatggttttattcagtaaactcctattctaggacctaggcattgaaaacaaaataggaccctcaacttttttttgcttttcttttctcaatacatttaaaatgaaatttttattttagaagcacccttatttacatatcaattcccccattcctttgccctcccatcctcccatgttccccaccgaccccccaacctaccctcatccactccccagggatagtgaggccctccaccagggaccatcaaagtccctcacatcatttggggaagagcccaggccctccttcccatatctgggctgtaatagtatccctctatagggaatgggctcccaaagtccatttgtgccctagggataaacactggctccactgttagaggtcccatagactgtcttggcctcctagctggcacccacattcagagggcttggttcagtccaatgctggttccccagctttaccactagggtctctgtgctctccctaggtcaggtcaaccgtttctgcagttttctccagccccatcttggctcctttgctcatcccctatccctctccgcaactggattccaggagtatggctcagtgtttagctgtgggtgcctgtttctgcttcgaagaatagaggagggcaagacaggagatgccttgatagagggagccagtataggttaggagagaggttgacacaggggaaatattaggggatccacagggataaccccaactgagaatctaggcagtagtggagaggctgcctatgacacccttcccctataatgagattgatgacaaccttagttgccattcctagagccttcaactgttttttttttttaccctcttatttatctcctataatttagacttaagtgttagttatgtaaaacttggtgtggggacctacagacaataagactcttttaccaaatgcatgttggttaacttccagtgctggttatgcaaaatcttgaccatcaccacacacacacacacacacacacacacacacacacacacacacacacacaatacattcatttaaatttacttaatgtttttaaatacaaggactgtgcatggaaacttgttgcatgtcatgttagtcaggatgctggtctatctgctttaacataaaacataacaacagtataataacagtgttttaaatcaatttacttctttcataggtaaaagtccaggttgccacggagcctaggtaaagggcagcattggcaggtaatgtcatccagggtcccagagtcttcccattttgttgttctaccactatctcattaatcagtgtgtgagatgctgtgccctagcaggggagggaagtggaagacacatggacgaaacatattttacttttcactccctatggtagagaagcatattacttaactttaccagaccacgaggggagcaaagttactctttaactgggttaaggcaggataaatagacattgcatattatggggaaatgggaaaagaaaggagcccttgactcaggagtctaactgaagccactcaccagccaacacaagaattccaacaattggcctaaggcttcttctcatctaaatccctgcctttttctaggattctcatcagaaaagctttctagccaaaggatgtatcctagcctctatgtgtaagcttagtgtttcctggatttattttacttcattgtagtcctgcctaaggaaccatgagagctaccctatgacatcatatatatctatatctatatatctatggggggagggaaaagaaaaagtttcttagcacatctttgaggtgtatcttgagcattaccaaagtagtgtatgtgaccagtgctaaaacacttgagttctacttttctttgagaagcctattctcacactctcaggtgtgccttattctttctttgtgtacctttttaaaaaattaacaaactaaaactttgtttcatttgccaatcctgtagttgttttccttggcatggccaagaatccaggtttatccaagctgaggtctctaaaagattaaaggaacaatacaagctgtagcagctggtgttagtattcaggtgtctctactggcctgtccttggggttctgacaggatactccctcagctgcagccactaagagcaccacctgtgcacattcattatgttcccttttaaaagggccttatccacctcccattcttctctttctttctctccctctctctgtatgttcttccctcttgttccctccctctctccctcccttttattccccccctcttttttctctctcttctttcctgctgctcctgtctctggaggatggtctcctcccttccctttccccattttatgatccctttccttaaaaaaaaaaccctctgcttgaaccctgtctcatggtgtctttctttcttgagacactttccttaaattactacggttggagctgtgccttggcctctaccagaagaaagaaactcagcagatgttcttggccagtgggcatgtctgtgggcattttcttgattaatgattaatgtgggagggcccagctcactgtagatggtgccactcccacatctgtgttcctaggctatataagatagcaagcggagcaagccatgagatcaagccagtgagcagattttctctgtggctactgctttggtgcctatctccaggttcctgccttcaattccttctctgacttcctcagtgatgagcttttacctggaaaaaaataagataaaacaaaccctcttctccccaagttgtttttggaaagtggtttttttttttttttttttttttttatcaatagagaggtaaaccaggacagtgacaaattctagaactctatatactcacacattaacctaccaatggtaacatatctgaagttagggctgaacttgaacgaccatcttactacccaatccttcttgatttcattcattatttctctctgaaagtaaccttggcttctggggactcattaacgtcttcatttattcatgctctcgggtcaatattaattgaatagctgctgtatgcaaggaattgtgttggtttgtggaggagtaggaaaaaagagtaagacagtgtagagtctttgccttagtacttatggtcaggaaaggaagaagtggattctcgatgtgtaattcatcagactcataatgtgtgcaggtgttgaagcaattgggagggtggcagttcagaaacaggcatgttcttacacagtgggatcaatttcagaaaggagagcgctgcttaagattgaaaagcaataacaatggaagactttctcaacagtgggaacactgtagaaagagctgtagcgattggaaaatagatgttactgctacccaggttgtttattgtaacctgggaggaagacaggagagatgagcagcctggcacacacaggtgctgacttcctaagcagctctgtcaggtggtgctgggacaaactccttttgaacattatgtatctcccaactaatgccaactgtctgcttcatagggttcataatgacagtgccagcacaggggcatgtaaggacaacctccaggtcctcacaggccctcttgatgtctctgtatctccttcccttcttggataattgggcctattaactccatacataaatgaaaattactctaatacctggctctgcatgttactttctgaatatcaacacagtccgataagatccttctgagatacagaaggcttggtgggctacattagcattccttacctagcagtgggggatattgtttaatctgccaacagcagacctcctgtgttgctgaggacaggagagcttgtccctttgcccctactgaggcaagtactagaaaacaagcatcactggaaatccagtaacgcattatctaaagtgtcacttaaacccttctcagaggagacctttgttatcacagtcacagctgccataaatgagacacttggaagttaacatagatatagaactacaccacatcccaagagcgcccaacagtcttaaacgtaaaatcaaaccatcttgagttgtcagtgctgtgcaaaaagcccttgtttaaaacagtactggagcttaaatggagcagaggcaaaatttttaaaatgatattaaaatgttaatttccctcccatatttctacttaaaacagtttctgaactcactgagttgaaaagaaagggttcaaatttgctgcaataggacagcatctgactgaattgtgagcatttccaatctgaagtgttttgattttgatttacatttaaataagtattttttgcaggtagaaggacctcctgtcacagccaggacaagttgcaaaaactctggcttgaggagggatccaaaagagagggggttgggggggtctgtcagttgatgttttcttgtctgatttgcacatcccaacatgtataaatgctggtgtaaatgaaatgcttggaactctccagaagggggtaatgcggcaacccagggtggcatgcagagctccatggcggtctacacagtttaaggctgatgaagaagctgtgggaaactttgatacaggattttagctacgtgggaaacgcatattcagctagggagtgggagcagctgaatgcttctcagttcttaccaattctttgttttctttcctaaatacctaaggtttggcaactagcaaacccctcatctgataaccagtctgaaggcacggttaaactaggctcttctaattcttctattctgttttcttaaataatttcccatcccccgagtattactatggattatataaaatttttgtcagtatcacggttggtagatcatcaaactggtttgcattgttacctgggttgacattctccagccaactgtgtatctaggaagagaaggaaagaagggggctctgaagctgttgtgcacagcttgattgattgattgattgattctagaggccctagcatgagttctaggccagtaccttgatgtgatgcgatgaattttaagcaaaagacaagtagtttgtgttgcatgcggtagacccactgtgaaatacctacatgctgcttcagcagcagtaatgaggcaaccttgcctagagacttactgtgaactgcagggagaggctaggtgctgcatttggccttagttgctgctctttgaattgaattttaatgatcagcctccattgtgaaatggtgatgcagtgacctccattatttctctttcatcttggtttggtagaccagtctttaacatctgacacggacctattggtgttcacattcctggataagtagctcttgcttgtatcctttgggaaatgtctttccttaagctggcagacagttcccagggaatgtcaatgctcactttttatcactacctcatactatctctggcttacagtgtagaaaaaatactgtgggaccaagggaacaattagtagtcgacagaaaacatttccttttgtatctatagccagaggaaactccttgcatctctgttagataacctgtgactttagaatcatatgagcacagtagcagcactgagcacatctaaagccacacagccattccctgggcgaggatggatgttttatcatgattctagcttttgtccattggataaaagctgatgagaatttatgtgtcaagtagttcagaagactcaggggctctgcatagccttatattcttccagtgtgctaacaagcctggagattgcttcagcatccttcatatctatggtccctcaacccctctcaggacttgtctctaagacactgacatcaaattctggaatgtaccaatctgcgtaccttcccagtttctggaaattcttttttcccctttgtatctttcctttaaatatctctccctttttctggatcactactctttaagaaagaatagttgtcttggtttagtatatgagcaaaagctttgagtttgacaagaatctttctatatgaatgtgaactgtctgtgcaggcacaggcactcaaagctcagtctccagctggtggtcctgtcttgggaggttgtaggaactttagaaggtgggacctagttggagaaagtagttccagaggcgtgggatttaggagctgtaagtggtcccaggtcccttccaccctagctgcttcctatctgacatgaggtagacagatgcctcttgtaggtgttcctaccaccctgatgttctgcctcactgtgagccaggcatcagtgaagtcaaggaccatggtgtaggggacactgtaagccatgcctgctagaagctggctacaggtgtgcccgaacacgccctgacagtcgtggtcaaggtgatgcaggatatggcttaaagggacagacaaggcacatgggggcccctcactctggcctcccttgccttgctgcctctggcatgctctggcttgcctttggctggtgtttatctaataaaagatatcttaacctgacagattaagtatcttcccttaataccatggactgaaatttttgaaactgtgagccaaaaatcaatcttttcatcctagttttggtcaggcattgggtctaagggacgtaaaaaataaagtaacaagtaacacattgggaaaaatcctagagcaacaaatctagaaaagctggtaccctgaattaaggggtggaggcgcgcgggggggggcgtgggggcactcaagcagtatggataaaagtaaaatatttctaaattctgtcatagcactaaatcattatggcagttcaatcaagaatagtttattttatccaggtggtagtagcacatgcctttaatcccagcactcggtaggcagagagaagcaggtggagctctgtgagtttgagaccagcctggtctacaagagctagttccgggacagcctccaaagcctcagagaaaccctatctctaacccttcccccccccccccccccgccacacacaaaagaatagcttattttgcatcttctataaactaacttatctagtcaaagaaaattttatgattaaagggatatgaattttagtcagctaattatttaaaaaacaatagattgtctgaggtggcctgcggataaaggacagcagcgtggtggtggtggggcctcttaaggaaaggtagccatggaggacacagagcttagttgtgatttgtctgcaggaaatgctatgggatatttttaaccagacttgataagattgtatctggtcttatggagatgttgagcagaagaagaggcaaaaagagggtaaggagacttttcttcttgggccttgacagaggcagtccacactccactcatttcatgtgtaggccttggtcagggacacaagtggagactgtctgcctccctcaagattttacccttctgggctcactctctgtccctttctttctgttgttcgtgacacacacctacatccacatgttcaagattcatctgtctgacacctttttcaatcccggaattccttggccacaattcatcctgggtacctgcacgtggagtaatctgttgtcagaagtcttctccatgataggggactacttgggccctgaagtgtattccatgtgagtcccaggtacagagaaaacaatatagagtcagaagggtgggctccaggtgaacatggatttcaggtgggcacacactcttggctctgtggattcaatgctcttgccgtggagaaagtttggagtgggcctctttgtcacagaagcctgaggcttctacagaagaggagacccagtgtcctggacttaagggtggcataacatacagactccaagccatcaccctttcactaaggtatagagaagccacagaaaagcttacatcatgccccaggatgaggcagacaaacagtgatcaagggccaaatgtcctcaccccagattccatactcttctaaaaggccagttcagaagaaagagtcctggcttctttttacaaactctcttttaaattggcttaggtgttaggaaaccaaatttcccttttatctagagaaactaaagaatttttccaaaatacaaataagttcctatgaacctattcattgcatcttttgttctgtcctgcactgtctccacacaacagttcttattttccttgaagaagccattgtatagcacatatgtgtgtgtgatatatgtgggcccatatatgtgcaatcatgtatgtgtgtgtatgatataaagggaaacagagagcaagattgagtagttaaaaatgctttggataaaggaattacctctttagtctctgtgatggtttgaatgagaatggtccctgttagatttatatttgaatgctttttccctacttggtgaaaccatttttggggaaggagtaggaagtgtggtttttttttttcaacttttttatttgaattaaaaacaggattgctccacatgacaatcccagctcccctctcccacccgtcctcccctaccacttccccccaactaaaaccctatctgtcacatgtcctttctgctccccctggatggtgaggccctccatagggtgtcatcagagtctatagtatcctctgggatagggcctaggcccacccccatgtgccccggctcagggagcattcccctatatggaatgagctcccaaagtccacacccatgccagggacaagtactgaacccccacaggaggtcccatagatttccgaggtctcctcacagaaacccatgttcctggggtggaagtgtggttttgttggtgtcactggggggtgggttttgaggtttcaaaagtgtaaaccagcccaagcccctctggctgcctacaacttatgcattagatatgagctctcagctactgctccagtgccatgcctatctgtctgctgtcaatattccccaccaggatggtcatgggctaatcccctggaattgtaagcaaacccccaattaaatgcttccttttataagttgcctttgtcatggttttacatcactgcaatagaacggtaactaagacagcctcctttcatcatttgtctagtatgactatagagctgaacatcaaggaaggggagttcttttttataatttacttattcttttaaattttactttacatttaaaccatagctctccctcccaccccttcttctgactcccccactcacctcactcccagctcacccccagtccactcctcctcactggtaagggatcccatgaagaatcaaaaaagtctggaacaataggttgcggcagggctgagtccttcttccatgcattaaggctgagcatggcattccaccacaaggggtggcctccaataagctagctcatgtaccaggtttgtatcatggtcctaatgtcaggggcccctctgatagtccaagcttcacaactgtatcccacatatagagggcctagttcagtcccctggagtctctaccactgtaggaatagagttcatgagtttccacgagcttggttcagctgtctctgtagatttctccatcatgatcttgaccccccctgctcatatattccctcctccctctcttccattggattcctggagctagccctggttcttggttgtggatctctgtgtctggttccatcaattgctggatgaaagctctatgatgatagttgggtattcaccaatctgattacaggggaaagccagttcaggcaccctctctactatttctgggagtcttagctggggtcatcttgtggatccttggtaattaccctagcaccagattctccctaacctcctagtggctctctctattaagatatctctttcattgctcttccattgcatccttccctccatcaaccatccctttcctgttcccacatgttctagccctcctcccctctgctttaatacctctcccttaatcatcagggaaatgcaaatcaaaccaactctgagattccatcttacacctgccagaatgtctaagatcaaaaatactaaggacagcctatgttggagaggatttgagtgagggaaacactcctccactgctgatgagagtgcaaacttacacagccactttggaaatcaatttggtggtttctaagaaaactgagaatcggtcaacctaaagacccagtgataccagtcttgggcatacacccaaaggatgctcaatcataccacaagaacacttggtcaacagtgtttgtagcatcattattcataataacgagaacctgtaaacaacctagatgcccctcaaccaaagaatagataaggaaaatgtggtacatttacacagtaccactcaactgtaaaaaaaatgatgactgcaagaaatttgcaggaaatggatggaactagaaaaaagccatttttctaagcaaagttaaaaaaaaagacaaacccagtatgtattcactcagaagtggatgttagatataaagcaaaggataaccagactacaacccacagctccagagaagctaggtaacaaggaggatcctaaagcagacacatagatcttcctaacaagggaaattagatgggatctacttagtaaactggggaaagaaggggaattcgaatagtgaaactttctaattgtccaataaactgctcatcttatctctattcaagtttcatctttttcgagatggggttagtgcatcaaaccagatgagatgtaagaaagtcattgagaagaaaagggagctgggagtttgagcaatgcctttatgattgtctaccaatgtctcctcttccttatcattcaagtatctgagtggggcaataggacagctatgagaaatagggaagtggagtcctggattgcagagcattgcttactttagaggatggatgttctctttggtaccaggacagcctgccacttatatcatcacatacaggaagtggttttgaagtagaggaaaattttccaaagactttgaacccttttcatgtatgttctcttggttctttgtctagatttatatttatctctggttgtgcttcaccctcctccttctgtggtggtcacccaactttgtgtttgctggtacaatgtccctggtctctcacaaactgccttccagactgcctccaaattctaatatggagccccacttaatcagacagggtctgtgttttcacaaaggattctgcaaggatcatggttgcactcaaaagtcttaaaaaatgaatgcatctcagtctgggccttttattttactatcatgaagactaagcttttttatgtcttctttgtagacatgaaaatatgatggaggaaaaatgaagattaaattcagacatgcaaatggttacatttgttattgagtattttaaatatctgcaaacctcacttctcatatcattggaataaacttaatgacacatatattataaggctctgaagcttcagataaatgacatagatgactatgaaagccaaagcagatctctgttgaaaacatcgaatatttttacacatatgctaattttcaattttggctttcttctagtcatcatttgcacaaaatatatggagcatatcaagtatctatactacatattggagagaggggctgtaaactccagccatgcacaggtatattagtgaaaaagctatgtgtaggggtctcaagctcttggctcataataggtgatatatcagtttggatggaatttgattattctgattttgtactctaatgaaggaagatgaatctaataaagattcatcttgctaattttgaactgaatctttaatttcatacttacttctttttttttccttatgtgtttcctgcagactttatacaccaaatcgcccgagggcagggcaaacccctgaaggaggtagtaaacctcattctagtccaatctgaagctacggggtccttgagtggcaatctgggtaacacatcaatatggtgagtgggtaggcctctcctccatgttttcatctcaaggatgactcaaatattattcagggaagaaatggtggattttaaacaagaaactgagatggtgctgagtccactgtgggcagaaatttgagtccaggagatggtgttgggaaatgtgctactgcaaaggggaagctgttgtggatatacagtgtactgttgagggttcaggatcattgttcctgaagatccagaagagatctgtgggaatttgaaagggtagctgctgcggttgacacagggtgctttgtagcatccatagtagcttctgtggagccatcagataaaccgactatctttttagtgtcatgtcagaatcattcaatttcttttcttttgtggaattctaaacttctaatccactggaatattttaaagcagccattgagaggagagtaccaaatattctagtaatttggccttgtggcttaagaggagaacaccaaatattctagtaatttggccatgtggtttaagacgattacttgggggacactggatatcatttggatcttaacattacggagtgatttgctcagctggtgggttgtattggtactccattttgttttaatttgtctgtgtccttttattttttattgggacaaaaggcaacagattacaggacgggccgtgtggcaggaagagccgactgggggagtaggatgtgttcttgctcttagtgcttgtcttcccagtgctggctgtgggttatgacccgagctcttggcttttgctgattattactctttcagaatacatgagctctctggcacatctcagggccagcatattcaaaggaaaggcttcccccccctccatacagaaactaaatggtgttgttagcatactcttttctattaggttgcaagctgcactgtcttattctgtgtatttgtggtgctatcattaaatatactgagtctcccagggagggcagtatctgaaacatatataaaagtggagttattttgtgaatcaattattaggctacaaataatgttggctagcaggggagaaaggacacctccctacaaatagaatatcaattggaagtgtggtgaagcaaagttggtttttgttgctttggggcataatgaatgattctattttgcaactgtttctaaaatgtaagcgttttcaaaccagcattgcagtgtttggtctctggagagcagtgaggatgtctaaagatagttttacttcccaagtacaaattgtttgaagaacactgagtcctgcatgctggactggagagttgtgccctgtgagaagagcatggaattgacttggtgtcaatgatgctatcccagttttttatgtgattgtggtcaagtcactaaatggtttgtttctttctggtttgtgtttctttgttttaatatgtttaatatgaggtctgtgttgcccaaagtcctttccagatgttgacaaatatctgtaccatgggagagatgctctttggaggagatttgcaattgtcacttatgcctctgagtggaggagttttagaagctctgctcacctttatcttcctgaatgctttgggtgagttttaaggatcactagaattacagacccatgtactgggccttaaagtacatactggtggaacgagataggagggttgttctactgtatgccggcagctgtgactggctgattagatcctgtgggagtggacatccataaaaggtgtgtgctctgagctggaacatgaagacacagctatcccttaaggatttcgaagctgtttaccttctctccttgggctctcagtgagactgtgagccaatcatccttagaaacatgggatttcaaagtttcaatgaaaggaagccagagaaagaaaggactttcatgtttactaatttcctctgtgctttgagtacagctcttggcttttaaatagaagattatacttaattcttataatataactttgaagtggctctaactatgatacccactctatggacaggtaaactgaggtttagagaattaatgcaaattgctcaatgtcactcaacagaaagacatagtgtcagataaaaattaagccaattcttagcttttgttctactctagctcgttcctagtctttctctgttttttgatggtctactttctccagtgattattacatccctattctgatctcctctgtggccagagattaacctccctgaatctctccctacctctgcatccttggccccagcagctctaatattcctgatttagctggctaaccaaacaatccatttagcttatctccatcagtaccaggaatgacaatcatgggcatatttactctgtcagcataaaacctgcattttataggtattctcaggttccttagaaatccagctgttgtggctatggctgttcccagcaaactgtgacaatagttcctctcagggagttcaggaagtgtattttcactgatgcttgagaaaaggtcccatagttgtgtgtgtgtgtgtgtgtgtgtgtgtgtgtgtgtgtgtgtctccaatggaagtatgcacagaaaagggtttcctctgcctgctgaaggggaaacacataaaattcccctttgagcacataacaggattcatcttgcaataatacttcataattaatttccccctagaacatacttcctcaacttgtatttgggtggaaaactatacactttggtctatatgaggcacaggttttaaataaactagtcttccatattcacaatcttgttctacttttgggtagtgttgtatagatataaaaagtattgggttttcattttttagactaaaggatctgaatgcagacttttgatttacacagtactccaccaagaaagatgaagactaagaagggaaatctctagcaacattgtctaaatgactgatttgacagaaagcaggagagcatctttgtcattgactccccacccctccacactgttcacaggatagtctacatggaagagagcatctccctggtaaaggggcaagtctgtaaacagaagtatctggaagggcagtgtcctatccatgacctctgctgggcagtttctctgtcaacttgatacaaactacagtcaaatgagaggagggaacctcaaaacttttataattctccatggagaaaatgcctccataagataggctgtgtgcaagtcggcagggcattttcttagtcacttgtgtgagagggctcagcctattgtgggtgttgccatccttgggctgatggttttgggttctataggaaagaaggctgaacaagccacaaggagcaagtccatgacctctgcatcatttcctgcctccaggctctggacctgcttgagttcctgtcctgacttcttttgatgatgaacagtgatgtggaagcaaaagtaaaaccaaccctttcctctccagtttgcttttggtcatggtgcttcatcacagcagtagttatctttactaaggaagcctccttattgatttttccatgatccactttcatgttcccttcacccatcaaaatctcatagaaagtccactgaagcaccggctatgagactctacctactttttctggaaatctgggatgtgcattgccaacaagtttctaagtagagtcatgctgttggcatgggaatcacacttgagagataattctctagtctactttctgttttttgtttgtttgtttgtttgttttttagtctactttcaatccagcattcctccctccttccctccttccttccctcccctgcccgccctctctcactatatgtatatatattctttctttctgtctctctgtgcttctttagtggtatgtataagtatgtgtgtgttcagaggtgcatatttgcacgtgtgtgtgtgtgtagaggccagagatcagcactgaatgtcttcctcttcatctaattttttgaggccaggtctcacactaaacctggaatttaatctctgggctagactgaccagtaaatccctaggatccacctgtctttgctttccagctttggggtcacaaatatacactgtcacatctagccttttgtgtgtgccctgggatccttgggattttgtaccaagttctttaatcacttagacatccccacccagagagagtaatactgaaacagagacatcagatcaagaagttttctcaactcccttcagtgcctgtcaacactgctaacattataatctacccatgtggtacccaagagggatatattgtaaaataacaatgcttcagggctagttgagatcctagcataattaccggtagagcccctcctcccttttttctattttgattctgggaactgagctgaggctttgcatatgtgatgtcatgtgggcacacacccaggccatatggtatcattattgactgccctgctctctcagaaggatttgtctggacagtgtattgtaatgattgctatgctattgataatgcatactggacccactctgttaacttgaccttctagaattctctagagcagtatttgtgaaattgagcagcaattgtgaaaatgaacttttctaaactgatgaaagatccctgtaactgtgcctagagttgaaggtcatgtgtgatccctgatcactttgatatattactaatatctaagcatggctgagaagctgtttcacattgtatatagttctgattaacttcacgtaaagtatttgtagctacatgtggctattaagtatatggagtatatgtggccacctacagactagggcacacttgtctccatgtttaagcctccagagttgttttcagttcccagaacttcctgacattcaggctctctttaaatccactagaacgtttctcttggaaaacctgacagctcactggatgtcagctcatcttaccagtagtcctcagagacatgcatctagtctccaccatgttagcagtcaaagcagggatggctgagagcaaaagatgacataacagacatgccagctgatgatgagtcacaagtgtaggctgtgggcacagcagtatcagaggaagggcattccctgcaagccgcagctctagagggcttgaaaaataatgctgctctggtaggatggtgcagtgtgctttcagagaatctcaaagacagtgccagtgactcatggaacatctagaagcccagtgacagcacccattatcacaatacttcctggagtttttgtaaagggatctttactgaaggaagaccaacagacaagcggcatgctcaagtgtatctctctggccactggaagtgaaggaattcaatcacttggactaaggatttagatagaaggctctagagtcttgataggatgataggatagtttgcctctcatgtactacctaggctgaacttgatacttttggtccacctcaccatgactgatactacctctctctctctctctctctctctctctctctctctctctctctctctctttctctctctcttttcgttttatgagacagggattctctgtggctttggaggctgccctggaactagctcttgtagaccaggctggtctcgaactcacagagatccgcctgtctctgcctcccgagtgctgggattaaagacgtgagccaacaccgcccagcgacactatttctcttgtagtctagctcttcaaggtcccccttaggctcaacccagggaagtccttgattctactagctgttgggtcagactgtgtcctgcttggagagcagaaggaacagggaccttgccattttattgctcagggtcattgagtctccctgctgtggtttaactggaactaaaaggaagactagactagtttaaaacctagatagattgtcgcttgatagaaaatgaggaaccagaaatccaatgggaaaatacatttcactgggcatctgaatgaggcaagtctggttacagaggaagaagctgctaaaaggcttcctggaacaggatgtgcagggcattttggtgcatggaatttaaatatcctgaagaacaaaacttgtgacatggatatttacttttccccctttgtgccaaggctttattagaacaatccaaagaaatctcagcaagaagaaaggacagcagaagatgcaggccctctgatgcccagtgtccaccctcttgattcccatggctcctctcacttacaagtatttttatgggagaatctctctgtcccttcctctccataaaacaaatattctcccccaccaaaaaaaattagctattgagacagtgtagagcaagaatgtgccaagagtcaagggcagggacagtcctctcactggtcacagacagaccataaggacaatggtggtctcagaagatggtgattccggaaagctcctcttgcagctattgtagtttttcaagcacagtgtgacagcaagtactgaatgatgtttattcagggacagaaagcacctaaacaacaattcatcagaacttgttcccactgctgagcttgcaacagtgtttcagtttgtctgggtgggcaccaagaggaagatctagcttgatacacagaaaattgcactgcaaatatggtaattttgaggatgagaaggtgggagcaggggacacaaatactcttttatccacagctctgattcccctgaacaagctacctttgctaaaaattgagatggagtttataaaatgagaactagaagttatatatttttaaaagatttggataagactactaagacaactgaattgagtggttataaacgtgtggtatgttcctatggtagaatattatttaactttgtaaaatagaaatttgaacacatgcaacaatatggaggaacctttggggtatcgtatgaagttaaataatctagtcatgggaggacatattctgtgtgatcccactcatgtaggagtccttagaagacaaacgcatgcaaaagtccagaagacaagtaaaatttccgttaccagaggctgaggagagggcatgagttgtctagtggacagagtttcagtcgaggaaaataaaacattgtggagatttggggcaaagaaatgtaaatattttgcttgattatacacttccaagtggtagaaaataatttttatgtttctctccttttttttaactgtaataaaaatttaagagatgtagcaattctgcaaaatctttactcccttaaagtttggttggtttatttatagagatttttgttgttgcgttgtttgcttattttggtggctctgggatatcaatacaggtattatgtatgttagggaaatactctaccatggagctgaacctctaatctgaaatttttaatgaatagaaagttccattgagctggtcccatggcttccactccaaggtcctactacagaaaaaggaaacatatgttattatttgtttgatcttatttgtgttttcttttttgggttgtaagtccatataataactttctggtgagaaaaaatgtgtgttttgttttgagtacctgcttgcctccaaactgtgtttggaccttccatagtgttctctcttttagcattcataatggctgtccagctcaactcatggacaggtaaaatcgaaggtgaggagaagttcagctatttggtgattctataaggattatcaaccaagaatagccagcagctttggagtttctgtttctagacaaatataccagggtggtccatgttttaacttgggtaaatgaggccactagaaatcagttgccccatctctggatggtattcctgcatgtatagatgtgagtgagactcagagaagttcacagtcatggccaaggttgcttagctatttagcaccaaagccagtgctagacaccatcttgaaattatctccaaattgtcttgtttgctattttgactttcgggaaaacatatagatcatatttaattggaaaatgtacttcttttctctttatttcatttatttagtacagggccttatgcatgtcaggctttgtagccaagagtgtttttaaacttccaatccttcaggttatagctctggagtcttaggattgcaaatatgtgccaccatgtctggtatatgctaaggattaagcccaggactttgtgcatactaggtaaacactctcccaactgaactacatttccaggtcagaaaatacatttttgaaaaagtaagctggatctagcaccttcacaggaaacattagtaaaactttggactgtttaatgggttggatttctcttaaggcatgctgtcttctagtgttatctagacgaagaataaaggaaaaaaatgatctcttccttggatgtaatttcaactctcatatagcacattccattaacttcctaggtagactgcttagtttttttttggggggggggtcaaagtggtgatagtatgatagatgatagatgaatataaaattatttttactagcattgggcagtgtttttattacagtcccaacagacatgtctgaccaccgccaacattagaagatagcacagccaaaacacgaagttcttgtctgggatgacctgaacatttttttttttttggttcctactctgtctcatgactcactcttctgtgttttgacaaaatgccactgagtctcagagcttagcctgcaaaagtaggaactggagttcggactctcctgctttgtccagctccatgctctctcaagctcaggatagtgtgtggtctccggggaactctcttgacattagaggtaaatgcagaatccacagaaacttcaaccttttcttccctgtttcctgctggaatcatgaagaggtcaggactgggatcaatatgccatctaccacaatgtattacacaggagagcctagagcctcttccctctctccccacttgggtttagctcgctctagaagcatcatcagaggagggccctagtctaagaagcccgcttccatctagctagacacacaattggtcttatagcactggttgtaaaatgagttaaccaaagttatttagttttcaaaatgaaaacaacaaaaatctgtccctaaggtaaggccatattgtggtcttgatggcacactgaaataatcagtgctctgaagcacactattatccttatttcagagaaattaaaaatacacacataccacacatacacacacagcacacattgttgacctctcttcctccctcagcacacaaagggtacagacattaaagtatggtccataaaattcagcaactttctctgtggttttctatgaatatttactactgatgggtcctggaactttcctataagacaactctgacctctaaagagaactcttctgtgaggactgatttcaacactatttaatttcagagccatgagaaaggatgtctacaaaatttctcttccattcacctggagttatatgcatttccttctctgacctctgacccctgacaacctctgaccccaggacctcctggttgtctgggaggattcgatgatatttgtgagaggggctagcacttgggttatctatttgagtgtgcagttctagtcatttgttttttctgctctaggtaaggatttagtccctaggatcaaagattagacttaccctcacagacatttaggttttgattatttgactcagtgcctgaaacagaaacacacaatttctagattttgtctagagacaccctgttactgtattttattttccgtaataagtatttcatgtatttttgggactgccctttataccttctatgtatgcttacattactgtagtgtgttagcttcctgtcaccatgacaaatacttgagacaatagaatttaaagaaggggcatttatcctggtcagttttagagattcaagttcctgatttgcaggtcccgtttctctgaagcttaggatgaggcagggtcatggggggagtacacggtagagtgaaactgctcagcttatggccaggaagtgacactggctgggctcccatagttcccttcaagatcacactgtggcccagtgaatgggccttacttctcaaaatgtcttgcctcccaatagtacaagctgagcctttgccatgtgcaccatggggagagggagctcttgggggaaagttatgttctaaatagtaatactcagcaatgtttgaagcaaggctccagatttgctcttctacttcctcactccaggttacctcctgcctctctgttagtggtgggggtcgtggggggaacagaggaaccaggagcagctgatcccttgagactgttgtgaagcagaagaggagactgtggaaaacaaaggcgatcccttccaaatatttgattctagtggaacaagccatggcggtgttcgatttcccagacacccaaaagcagaacacacacagccaggatgagaacagttcacagctgtggctgaggactgagattcaactggagcaagttaaagtgagcctgccttggcccaatcattgtccccagagtgtgtgacagtgttctccttaccacagtctcatactttaaacaacacaaatggtactatagtccttcttctgccaaggatcctcagtttcactgtggaccaagaccagaacatcatgttacagtgatgtggttgtccctgcctgatcctacagccctgttccttctgccacatgctcactgctccatagtcacactgacttgctacagcgtttttcctgtgccaagttctttcttggcagcagtgctttgaccgtgttgtttttcttgcctggaaagctctttgccctactaattcttcaggttttatcttaatatcattttcttggaaaggccatttctattagtctgtttcacaacactgcattctttccattgtctggattgtaattaggaattatatgtctgttgagtgatatgattaatgtttgtcttcatcactagttagcagcactggtaaaggtaagaaggatttgttgtgcttgccaccgaacttccaagaattggcatgagtatcctggtgtcaagattaagatgaacaacttagccttagatcacagacagcacagagccaagtatccccaaaccagaaaacccacttctctgggagcaaaaccatccatcaaacacctgggcagataggacaagaccatgaagtttgtttgttcaaaatttgaggaggcatatggataaacttactggggaggctgatagcaccaagtagggagggccagaactccagcaaggttatagatagcaagcaagggcaccagcaagaaccacactgcagtgattccacttacaaggcccccctgtgggctcccagtcataactttttaggctgatatgttctgtgctcccccttttccagactgtctggaacgtctgcatttgattgcttaccctggctgtggatgttcagtctgcatactcccccaaccagagcacactgtgccaagggatgcgcggcagtctttggtattcagtgtaaagtgcatcaccagaagggctttcttctcttcccggaggcatatagataggcgacagaacattctcacccatttttaatgagttgtattggattaaaagatgctgggctgaaaaagcccacacaagaaatagagagaaaaaaatcattaaagactgcttttgcagtctttaatggtatattattatatcattaaacatattatatatttataacaataacaacacacacacacatacacacacacacacacacacacacacacacacacacacacatatatatatatatatataatatatatatatatgtatttttggggactatgcaactttaacagggaagaacaaaacaaaaagacatggcctgacatcttagaaggctgatgaaacaaagactgcatgaataagacattgtagacaccttttgaatgattttcctctcttaggcaaatgggctgttttgaatgaatgaattgctttatggatcaacccttttccttaagattcttcctcaggtttcctatactgaaaaggaagagtcatggagactaagacagggtcggtccactttctgtttgacccattttgcctaatttggtaagtttctcagttttgatgaggggatagaatgcctttcttctcctggtaggtatcccacaccctaaggaattttatttgatatccgatttttctttcctcctcctttcattccctcccctttccaggtgtccctgagaagagtgcagcctttgacaaatcccagagttctttgggagggatgaaatgatcctgtcaaagctaatagggagaaatggcacacaggaggagttgctgagaaaatacccacggcctgttttgaagttcatcattgaaaatgatttccatatccgtcttataggaagatctctctcacacactcctcccttctgtctgggagatagcctttcctagaacttgtctgggtactcaaaaaggagtttttaatgttctctcatacaaacacaaacttttatacctttctttttaaaacatctatttttaaatagatcggtgtctatacatgggtgtcttgaccacatgtaaatctatgtacacatatgtatataatgtctaagtgttggaccctctggagctatagttatagacagttattagctgtcaagtgggtgcctgaaccaaatctgggtatcctgcaagagcaacaattgttcagatcactattccatctctccaggcctgaaagaataattctttattaaaatgaaaaccctccatctatgaaatggcaaccaagcttacagtacacaatgctatccagaagttctagttttcatcagcttaggttgctcagccctggtctgtttgagttgggacagagggtttacagactgtcaccttgtcaggctctgagggtgagaggaaatttaatgaaaagctccttactaagcatgttgtttctgtggcagccaaagtcaaactggaaattgccagcaaggattggccatactgggctttgttttcctgtggttatgaagggagaagggactcccttctctactgccttgtcctctatggttaggggaacctggattcctttccccatttcagctaccttggaagcatccacaaaagtaggtacaatgaatcctagccactgttgtctttctagttgaaaatgtggagacccgagggagtgctgtttcattaatgactagagaagaaacactcacaggtatcaagaggggaacctggaagctcagaggagcgtcagacctccaatgttcctgccgatgggcttagaagatgataagcagcagtgtgcaatgttttgcaaaagcagttatttgtgctgaaatactctcaccaggacattttcagaacaatttaaaggaaaagcctcaggaggccatattcgtaggcattattcagtcctgaagccagtattttacactcttatttaaagaaatttgaagaaccaatctttagcaagtttggagtggagcgagactgaatgtaaaaactggactggggagtcaacctggaagaaaggcagaacactccagaagcacatggcatcatggcttctctctgctgtttctgtgtggtagatgccaggatggaagtgaggctcctacaggcacccaaagggctttcttagcatctaacatttggaatcctttaagacccccactggtacagagtagatgctcaaataacacagccaaaggaagcctgcaggaaggggaggagggataaggcagaggaaggggagtgaggaccaggatatgccttctgaaacccactcggcataatgacttgatttgtgaattaccactgacaggtgaaagaagtgaggaggaacataaaaatactcaagaaatttaataacagatattgaaatagaagacacagtttaacaaggaaatcttaaacttggtgagatctttaggggaatttgagaatgaaatcaataggttgtgaaaaaaacagttttactattctaaattttataaggataatgcattctaaagaaaacatagtttgcttataaaaggagtttaaaggtacaaatactaatgttttcatgcagcatgtatgtgtatgtgtgggttctgatgcatgtaggtgtatgttgaggcctgaggttgatatcagatgcctcctttcatcttgtattttaagacagaatctcttactgaacctggaactcaccagtttggacagactggatggccaacaagccccaagagatcctatttagtaacagggcttagtattggctgtctttgttatcttgcatgtagccagccaccctcaagtccaaggcccttcatttaggagatatggaaagagtggatgcttaggatgacatgttcataggggaaggatttgagatatactaggaggttttattctcagagaaaaactagaaaggcgtccaggcgcaggtagtatgctgggcttgcttgcatgtgtctgtgtgaggtgatgggctgccatgctggcatcttgtgaagagcatgctgtgaaaaatgttaagaagacaagattgctttccctaattcttttcattatcatagatggggcataaaacaatatacccagaggctagagagttggctcagtgcttaagagcacctgttgctcttcctgaggacccaggttcaattcccaacaaccacatatctttacaactctctgttaactccagttccaggggatctgatgcccgtttctgacctctgcagggactgggcatacacatggtacacagacatagaggcaggcaaaacatccacacatcagctaatagaataaacaacaacacacccggaatacatctggtacaaagagaggaaaatgtgaagaaagatgcaccatgccttttttttgcctgtgtttggctagcagtctagcttatggtcaggacttagatgatcctctgtttctgatcctgggaagaggatcttaggtttgggcaatgagctactgatggaccaggctgctggcatcctacctgctggcatcatcattcctcccagcacactgaccttttccaggactcagggtgtctcacttcttccttggctaattctggttcattctgtgatctatctgaccgctgaggctcatctaaaagcctttctgtcagcccctgtcaccataacctcacaaagactgcctaattccccagattagcaaggatcatcttcttgtctgtttctgagaatagttcatgggaaagttatgcttgtgcatggctcagtgtcctcatctgtaacagagaatattaagtgtattgatcatgggatacaccatgtaataggattaggggtatgtcttaattttctattgctatgaagatacaccataaccacagtaattcttataaaatattttattgggccttgctttcagttcagaagttttgtccattattgttatggtgaggagcatggtggcacacaggcagacatgatactggagagtagctgggagttctacattaggatccataggcagagagagagagagaggcattggaactgccttgagcttttgaagaaccaaagcccactgcctagtgacatacttccttcaacaaagccatacctcctccaacaagggcacagctctttatcttttcaaatagtgccattccatggtgactaagcattcagatgtgtgagtctatggggggcattcttattcaaacaaccacaggatacctctggcaaatgctaattgtcagttttgatttttaaccttgagggcagggcctatatctatgcttttatatgtccctacagctttcttccattcaagccaagagaaaactgtctaaatgtgtttgttaaatccaagaggcaggcctggaaagatggctcagcagttagaagcaagtactgcttttctagagaatcaaagtttaattcctagcacctatgctgggtggttgacaaattgactgtagttccagctccaagggaaatcagactcccctggcttcttcaggtacctatccttgtgtacacatacatacacatacacacacacattattcaaaatactaaaaataaatctttgaagtcataggagatgttcagaaactctgtgagggtagggctggtcaaagtcatggaatactaatatcaccagtaagactcctatagcctagacctagtaaggtagattataacacagagagaacaaggcctttggctccagaacacactttacaagtggccccacagaaatgacatagccatttctagtttcatttgttcctgcgataaacaccacaagcaaaagtaactgggaagaaagggtttattgtcttttactttcaggtcatagttgatcattgagggaagtcagtgtaggaactcagacaggaactaaagaagaaacaaccatagagaaggatgcttgctgtcttgttcactggggcttatgttctgctagctgtctgtggttcctcctacaaacaggctaagccctgtttcatcaactagcaagacaataaaaatgctccagacatatgcccacaggccaatctgatggaggcaatttcttaattgagaatgcctctataaaaggagttcttaattggtctaagtaataaaaacccagagtcagaaatagagaaaaatgtgtctcagctgacaagagaacgagttcctgtctttccctgcatatatgctgtttacacccagctagctcacttcctgtctatctatacagatctccagatctttatggttagctagtgacaagctccattctctgaccttcaaacagactttatttgtacaagcaagatatcatcatatacctctttccaggtgactctgggtttgtatcaagttgacagctgaaactatgacagagccttgttctcttagcactcaggattccatccagctcctatccttcttaggtgcctaaagaggctgcttcttggcaaaagctgagaattatcacctcatttccaacttacaagattttaagaatttcaggggaatgcaagagtcagcatgacctttttaataggaaaaaccctaaaggagaatcaggcttccctggctttgttccccaactttgcaatataaccagttcctagctcaaacctcacttggctgcagtgtcctcatgtaaacagcaggtctgtggactttggagttagtaagatctcacttagaagctaactttgctggttactagtcatgaagcattggccacatgctcagacccctaaagcctttactcccttaggcccaagttttacttcccaatgaaagcactgctaagtaggttaaatgaaggaacttcaagaagaaagttaaccaagtctgagagatcgtagtggaagtccatctgtctgtagtgtagttgtaaaagctttcctgaaatttaacaattgcctgcaattaaaaccactcttatttgttaagcagaagcatacatacacatgttccaaaccccaagcagcacacattcctctcaggggataattttattgcaaagaatggcatcttgaccagagaactacagacaacccatttattttaattctccatagtgttttgaactatttgtaatattccatttgtgctagatgcttttaaaatgtaatgattactttatcacacagagaaacacatcactggacatctcccctttaataaagcatgcctttagacacaatattgtgcaatgtgattacacaccattacgggatgttcttcttactatggaaagcagtggagcaaatgatgttaatattgttgggatgttgcctggctttgctgaatcccagtaatacttccctttagaaagtgcacaagaatggctggcaagtctgatggccagcccactcaacagtcttcagactacatttttgcatgtttcatgctttggaatcaaacaccttcaaattgttccatttttaactgctggattgcatttcagcttgagatcacactgaaggaggggggagaaaccccaaactttttgatctaatagctttacactcctctgctttacaaaagaagtatctcgtttatgtctccgggcacctggggacagggaactgtggattttatgaagtcctgagctcaagcttcagtttagtgctgttctgttgtcagcttttccacagtggactcgtccatgagatcatgtgatttcatttctaactccagtgtttcagagaaacatcataaggatatagttttacagatagaagagaaagaaaggatgaagctaccttgactttagagccccaaggacaaagaaaattgagtacaaaatagcccacaatgcatcagatagtcccatccgatcatattccatgtttcccttctggaactgtggacaagtctttacagtttctaaacagtgtccagactccaagccaaagatggcctgcttcaaggcaagcagtctagaatacattcactgttgaggaagtctcatttattcaagtacttctggcacaaaaacaatgtacaggacagtgctgggctctgggggttcaaaggtgtgagacataggactcatgggtttcaagggtcttggtaagggcttggagacacagagggtggagaagaatttcttctggaaaactgtcctcaagaatgtggggtttgacttagacttaaagacagcttgtgctttcaaaggtgcccagaagtacccagaggctcttctctcacagtcacaaatgaaaacaaaacagacttttgcagaatgtgtcttatgatagggcggtagacagcatcggtgataccattgtcagtttgtacaggaaatggtccgaaacctccaaaatcatgagtcatttttaaagagacagattggcttatcccagttctcatgggtaggtaagagtagaactgggaaaaaaattggttagaattcagatttgggtatgtatcatccatcatctaagactgtctaaaggaaaagaaccaataagatgtatatatctggtataatagtagattgggttggtttacaggacggggctgggtaagccaacggtggccttctgcgtgctggaaaggcagagtattaggcagttgaacaatccgggaagctcagcaatgctaacacagctgcagccatgcatgtactcacatggatgggaaaggagcttgcattctgcatgtgctacttctgcacagctttggttcatctgagctgcctttgggaagatatgggctgtattcagcatgggtctttctcctcagtcatggtctcacagagcaattctccctggaaactcccctagtcatacagagtcatatagaggtgttttccaccagtcccagacatttctcaatccagttgggccgacaacaaacacccactgtcacaaaggctgtttctctgcttgatacctgggagaagaagaggtccaagtggatttttggttttgatagcttttcacttctcttactcatggaatgctctggataaaaatgcaagcctgccagtggtcttgtttaatctggtgaagccagcatgctatctgtgtgtttttaaaccaatgactggggagattgggtaaggcatgagagaatatcagaggccacctagatccctgcctctgagagccattaacctcttgttgagactgtcctggggcctgtgagtgtccaaagactgatgaagtagagtgagctttatcttttagctctgtgggttgtttcatggtccttccatgggctctgtggcatcagaatgactggattatcttataggtacaggaatactgcagtgaagaaggctcacatagacagatgagattcataattagagcagagattcagatctattttagtcctgctggttttcagtctgctatggactgtgatgttttttcatcttcatgaagaaacaatgtctcttatagtaagtcatgatttaaatgaaaggttcagatgctttaaatttttgtcaaaccctaagtctcctaggtctttaccagatagtgatttttggtagatgggaaggactgtggaaggggaaaaatgggacacagagtttatgaagggatggaaagaagaaagaaaagcaaagacttcctcttccctaaggggaatgtgaaaataagagcctaacatagagcactgtcaatctcacccccaaccccaatctatcttctctgcacatgtgctctgtaggggccccttctccggtgtggttctgctgttcagccctgaactgtgctcatattcagccccttacttgtaaacataagaccatcctggcaaggctaccttatgtcattttcaacgctcctgcctagtttcatctctctgctttaagcttggtataaaatgtctgaacatttcagaatttctgtattgtttttgaaactagtgttgagcaatattcttgtatgatctctattaccttaatcttactagtctatattactctatcatctatctgtctgtctatctatctatctattgtgtctctctgcctccctcttcgtcctaaccctgtgtgtgtgtgtgtactcccggaatatcataaataaatgctactattatttggatcttaaatatccctccaaagcccaatgttgatacatactctccagtcttactggcattattgggaagtagaagaactctagaaagtatgaccttgtgagaagaaatgaggtcattagggtcacatgcttcgaggagatactagtatctggtctttctctccattcatgctttaccatgagattctttgttctgtcctgtgtcccctgccacatttttctgcatagtgacaggctcaagtgtatgggggggttcaaatagtggagctttcgaagtctcttaagtgtgcaccacactgcactgaagacgattcccactcaactaattagctgtggagacttgtctcgggcagcagtcaaagggagagaggggctgctgtgcccatttctgatctgaagtgctgatacatgtgtgctcttcactagtgaccaaatgccacagtgctttcctgccagtacctgggagtcactgactcacacaaagaacttttctcgttagaatgacctcagcttaatggatgagacacagtgatgagaggtgtaggtgtttataagtgcaaactgggtcctaggatgtcacagatgccattcatatgcacagcgcttgacagcttacaaaacaacttcacacatcttacctcatttggcccccacaattacttccagaaataggcagggcaggattgttatttcctcctcacagctgggactcaggaccaaaagccttgcctatgactgaacggtaatgaaaggcaggacagattctcagacctagaacatcatttgccaagtcttagactgtttctgccatcctcaaagtgtcctagaagacactgtctcccaacccacacacaccctgccccacactccaaaaaaaaaaaaaatggtgggaatagctgggaagtgaaacaattatgtaaaaaagaaagaggagaaggcaaagttgactggctgaaaactggcaaagcagctcaggaggatgagcccattttgtttttatagaggacttaaaggcatttttttttcatttcagagaaagagaaaaggtattcagaaggatgagtttagccttctgctccagtcggcttggatagcagcattgccggtcagcagaggggctgggaatggccagcattgccccttcagtctccttgtagaaatggtttgtgagcatgagagaatctgtcatctcagaggctgctggtgaaagttccttccttgtggaaaagaaagatgaagggataggctaccatatctgcttttatgctctgtgaacatatggcatctagaactcaaacacccactttgagaccaggattagtggtctatggtgtccccagaacaaagggatagaagcgatgacggagatccttggatggcctgtgaacatgaaagagatagtcctccaggatatggcttcagtgaatcagcccagctttattccagaatatacaggaaatgtataggattgggaagcctggggacaaaccctaatttgcattaaatggcatgcacttattataatgcttcatatgtgacagtaggatcctatagcaaagctcctagtacaagtcttacttaccatatatacagcaggggaaaaacttctagtaggtatctgtgccaagggtcatgctagagataaaccaggcatcctggcttagtgacagctttcagataaggtcggtcttctgggtctagagacattctccagacaagggtaggtagaaaacagaaagtctcactgtggagggaatttcatgttgttggagagagctgccaggccataatagatcacaacttctgaccattgatgcctccaacagtggtccattctttaaataggacattaactagcctcacagccactctatatccagttattaccacacaagcaaagacattactgctgtcaaaattactcgtatgtagctgttctcttccatgggacaaatgttctcttatactgggacaaggcaatttcctgggcctgatacaccctctgtctaggatcctggcattgcccatttgataaggtaaacaaactctgcttataagagttatgagaggaaatttggagttaaatgctgggcaaagatgctagagagatggctctgtgatcaaaactacatactgcagtcacagagaactcaagttttgttgacagcactcatgtcgggctgctcacaaccaaccataaccatgatttcatgaaactctgacacctctggcctcactgagaacctgcactcatgtgcatataccctcttatggacacacctgcacacacatagttgaaaaggatgaaaattaaatctttaagctactataaaatttatttatccagcatcaatacactttaacttttatctccatggatttgtacttcctagtaaattcatacccggaactacaagtaaccctcttggtttttctcattaaaacactatcatttagttagttttgatttactaaggttgcatcattcctagaagcttgcttttacacatattccaatctgtgcctctgactgcatttctgcaaacttccctctccttactcagcttggtcacacgggcatcgtcactttcaagaatctttccatccctaggtgaccttatgacacactttaaccttctatggcaattaacctaagaatctgaaaacttctcagaagccacaatattattcttctttctaattttttttttttggtgaggaggaaggaaaaggtattgttttctttttctttaaaattaaaaggaagtaaccaaggaaataaagcttccagccattcaaaaaagatatttagaacttttagtcaatagcaaaaatcacatttgggaaacaaaagacaaaatgttaaagaaacatgactcgaggaaacactgcacatttctgtgatcacctaaagcttgcacgtgttaatatattcaaaaagtagtttatggaagatctattcagaaaaaaaatcactattgttccctaggtgagagcttgtaccttcctcagctcagcacctgaaagagtcccctgcaacataaacacacacagtgcacagtttgtctgagatgaggaagtgtgctgtgtgctccggaagtgcttgagtctgtgtggacttttcgtagtatattggtttgacaaaagaacctcctggatatctgtaagcctgctgctgctacagttctttatatctctgtctctgtctctctctgtctctgtagtgtgtgtgtgtgtgtgtgtgtgtgtgtgtgtgtgtgtgtgtgtgtgtgtgtgtaagtgggagtatatctgcaacaaggaaaggagcatgctgaatatgaagtcaattcatcaaacacaggtttggagtaatgaaaacaggaagctaatgagcaaacttcctcacggtagtttccacctttctgttttggcctctaaacattgctttcttgaatcttcaagggcatggtctttgccttgtctttagtaactgatgatgatgttgcaaatgtcagacctgcaacaaactccagtgataagaaacagtgaagagtcactaacaaacatgacaaggtgtgcattactggaggcaatcacacaagtttcagaagcattcaatagactctggccctgttgttaatgacctgagaatgtgcttggcctttttgttgcctctgttatgtgcaagtaatgaaaatattgagaaagttactgtgactataaagttgcaactgagtttctttttataagataaagtttgattcatcccatgacttggaaaaaatggtttattatgcttcaattcaaaggaaaaataaaattaggattggtggaaagggaacagctcactttgtctgggtcacttggctccatctcaagatgaatggactttcacattgccatattagaggaaagtctgagaaccagtgaccaagctctcatcttattgatgccactactatgagactttggaaatgtcttagtaaattgctgagaaaccatccacatgtagccaccaaacaattacccacaccagcaggagtcctgtcttcctttcttttgggttattccatgctaccagttccttctatctctttagggaagagtggtgctgttctttcgggtcattcgccaaccattctccaatgatgtgtctgcagcatcatggctcatcttgtcactttgtcctcttcttttttctttttaaaaattttttggttatcgtaacacaagctggcattaaactcttgatcctgttgcttttatctcctggatcctgggattacagtgtatatcaccatgttggtttccatggcatcttttaaaatatgtgtacctgttagagaattttttacttttgttcagatacagccacaagggtgtgcatttgtcattaaggagtaaagagaacacagagaaggggtgctgcaacaaactctcagtaagcaagtatttaagtggaaagagaaaagcagatccagtgatgaaaaacaagaagggatagacagagctgggatgtgatcagcaggaagcaggtctaactagagttcttcttgtataagaaagtgctggctgctgactttggaagatgctcactgaatgctaaggaggaggatgttgatgccactgctcattaaaactgaaaaggttggtttggggcaagggcagggcacacacacgcatttctgatgttaataaaaatatatggtgttcaagaataaggcagcaaggtctctggatcttaactctcttgtcatctcatttccttttgtcctgtctctgtcatgtcacctattatgggcctgctgtgggttgaatggatctcccaagttcatgtgctgggaatttaaccctgaacacagcagtgttaagacggattttcattgtgtaaattaatgccactgcttgtaggaataaagagtgagtgcagctcatgctactgttctcatcagcacgccacctttttgtctccaccggtgagcgacctgaagcccatgccaggttgaggccgcttccttggacccggtatcctccagcttttaaataaataaacctttattctttgtaaacagccccagtgttttgttcctgaggcactatctttattttcttctagttctctcctttcgtagttaagaagattttctgagagataggacaaatagcctacttctctgttcatgtatcctatcatttacctttttgtcttctacctgcaacttttcttgggcactctaaaaccaaaatatgccttgaaatatcttggttttcctgtgacctaggacagaatgtcccatgtctagcaaatgtgaatggtaaatgaataaattgatgatcggtgtgttgttgactacaccaagacaacagggaattagagattaagggagagggaagtttcatgggaaaagatgtaatagataaacttagacagagagttgcagtcaaacaaaggtaaaggttcagtggtaatgtagtgtagaggtgagcatagctgcctcttaaagatgagggggttttgcaaaccagtgacaactgaaattatcatattatttcaaggatattgaagccagatttcagagatttggtaagcaatgagtaatgaagagacacagatagactctttgcattctagaggaataggtactctgatgggcttcactaagtacaacttggtcttgaaaaactgcaaagaatatttcctatgcatttctgagtttactcataaaactggaagtctccaaggagtggtagtaaataagcacagtaatcaaggcctccatgtgtggctgtgcaggtcacgtatgtatacagtcctctgcagcatacaaggctgcagtgctgagagtagtgataggtcaagaaaggcaacactaaatgatctcaaagcagtggtaccctgaggccaatgccacattgagtcaggatgactaagtccagacaagaaaaagatactaaatatgcaagagtcctacatcaagctaggattctcaaagtgggccaaagtacatcaaactgagtgttccctttgctctcacagaaatcatacatacttcccctggtagaaaaatctattctttagcatttgggtaatctataatttaagtctgcaaaaatataaactgaaaacaaaggtttagagaaataaagtaaagacatactgtagttttaaatcaatagaactagattttttaaatgtatttcaactattagaattatcggatactaaatataaaggtactctacttgaagtattaaaagaaatataaggagataatgaataaaaaaacaaacctgagtgagaaacagtgaaaaatatcaaactatctgagaagatctataaatcaatcaagtaatgcactagagacaaaatcataaattaagaaattaagagctcaatgcagtatttaaactgatggaattagtcaaagctgccgtcactattggtaagttagaaggtataaccataaacattatctggaacacatcacaaagaaaaattttttggggggtccttttgagacaggatttctctgtgactttgtaggctgtcctggaactagctcttgtagaccaggctgtccttgaactcacagagatccacttgcctctgcctcctgagtgctggaattaaaggccaaagaaaatatttttaaaatataaaagagaactcaagaaagtggaataagacaggacatttgtcacatacaaaattcaattagtctatataaaaagtcaaaacaacaacaaaaaaacccaaagaaaagcagagacagaaaagggacaaaagctcaaatgatgtttaatttttatgtcagtttgtccaggttatactttctgaagtgtcattcttttctctggagaattctattctaattaatatacgatggggccaagcgttggtggctcatgcctttaatcccagcactcaggaggcagaggcaggcagatctctgtgagtttgaggccagcctggtctccagagtgatgccaggataggctccaaagctacacagagaaaccctgtcttaaaaaagcaatatcatgggtgatagaactctctctatatatagaatatatgcacatataataaggtattgtatgtattagattatatggtctattgtttatataaaatcatcacatcatagaaaaagtaaaatccagctaaatgttctttataagaatactcttacaactcaagggtatagaataacaaacaggtagaaatactaataatttgaaaattgtaatttttaatagattgccaacatgtgtatactcagttttagactgactaagaaaaaaacaaactgaggaaaggaaaagctatgagaagatatagttataagtaagctaattatagatctctatgaaaaccttatgttagtttacctgaacagaggcaaaatataaaatcctttaaaaatgtaactaacctgactgtaagagcaaagaaatctgaatcttctctgagatacaggtgacatcttaggagagctctggcaattgaaggaatggattattttatgaatgtaatggctcatgcttataatcttagcaatcagaaggctgaggcaggagaattaccatgggtttgagaccagtggaaactacatagtgagatcttatcctaacaacaaaaacaaaacaacaataacgaagagataaataatttcaatagtatataaattctactttaaatgaaaccagggaatcaatacaattcatacttgatattaaagcccattaaaggaattaaagaacagtcatgtttcatttaacaaagacattaagtgaaatataagcaaagaggaagtagtacagaaaacacgaatgcagcattacaatgtcacttttctcctgagagtgcaaagttggcttaatattaaaaatttaataaatataattttcctaaaataacaagttaaaagacaaagtgaaacaattttagatgactgtataggcaaaaattctgagcaaattaggaatatgtcagaatgccttgctgcaatgaatagtgtttatttaatttatgatgtcacacaattctcaatggtgagttgtaaagggtattcatttgtgggaagtgtatctctgtgatgtacacatatatgtgcatgtgtggtggcctttgtgtgcacatgtagagggcagagattgactttgggtatcttcctctattactcttacctatctttatttatttgcttaaaatctttttaagtgaaatatattttaatcatatttctttcctcagtttcccccacatcatacccaccacctgcccaatttcatgttttcccctctctctttgtttttgatacaagctttcttgctgaacctggagcttgccatttttcttagactggctggtcattgaggccctagaatacactagtctccagctctccacagcattggttcacaggctcatgctgacaggcctggtgaagggggaccctgcaggtggtcacagcagtcagggaagcataccttgaagaggtgagaatgaaaacactgacttcctcagcctgaggagtgtggtgttgggtggtttattcccaacaaatttaaacataggagaatttggaaaaagagtttcctggtgcaatataatatctggtgcacaaagaagcataattacatcaaaacttaactaagggtacatgccatattttccaagaagatgggttctagagataggctacctgtactagcttaagggtataaagagggctctggccttgtctccattacacagatagcacagaggtcatttaggctattagccacctctggtcctggttgtggaagcttgatatggcctggcccaacagataacaaagatcaccaggctattaatcacttccaattcttgtctttctgcatggaagaatgggtttttcatctttctcactggaaagataatcctgcatgcttaacattcctggcttctctggccatctgtaggcacaggggcctttgtgctgtgctcccagtaacttggctcttctttgtttttttcttttctctctctctctttctctctctctctttctttttgtagaaggcatgaatagactaacattcttagaaagaggggaggttgaaatgtttaggaaatacattatcaaaatgtgtcatttattgtttatcttttaatgattcttttctcatacatatatctttattatagtttcccctccctctacttctctctgtgtctcattatctcccttggatctaatcaaaatcaaataaaataaagaaaaattttcttttttattttttccattttttaaaattcaaattaaaaacaagatggttttacatgtcaatcccagttccctatccctccacttctcccctgcccccccctcaacaccctacctattccataccatttctgttccccagggagagtaaggccttccatggagtcttcagagtctgtcatatcctttgggatagggcctaggctctcccccatgtgtctcagctaagggagtattcctctatgtgaaatgggctctcaaagtccattcttatgctagggataagtactgatctactacaagaggccccatagatttccgaggcctcctcactgtcacccacattcatggggtctggatcagtcccatgccggtttcccagctatcagtctggggaccatgagctccctcttgttcaggtcaggtgtttctgtgggtttcaccagcctagtcttgaccccttagctcatcactcctcctcctctgcaactggattccagttcagttcagtgtttagctgtaggtgtctgcttctacttccatcagctgctggatgaaggctctaggatggcatataagttagtcatcaatctcatcaggggagggtatttaaggtagtctctcttctgttgcttagattgctagttggtatcatcattgtagaactccagacatttccctagtgccagatttctctttaaacctataatggctccctctattatggtatctcttatcttgttctcttctattctcccccccctcgactcaaccttcctgctccctcatgtccttctcacccctcctcttctccccttttcattctccttgctccctctcccctccctccatgcaccaaatttgctcaggagatcttgttcctttccccttctctgggggagcatgtgtgtctctcttagagtccttcttgttggcttttccaagagcactagagatccaaactcaagtccttgtgttttcacaacgagcacttcacacacctgcctatctctccaatctccggtattcactttaaaatattaaaaagacaaagacatcagtcttcacaggctagaaacactgcctatgtagtaaagttatgaaaataaattcaatgatgagaactggacttttacagttaacagcacacagaaaatatactgcagtatcagtagaattgaagtttaagaatgtgtttagcaagcaatgcccatgatttgtatagagaaaagtgtctataaaactttattgcaaattgctaatagctaaataaaatcagaaacatatcattttgagtatagactggacactggaaactgataacttccttctaatttgaacaatagattttcagcagctttgagcaaaattcccactgcacattttgaggaacttgacaagctagctctcacacttatacttcaaagatagccaaaaccagactcaagtaaacactggaatgggtgacattatcagatagtcaagcctaatgtgattatagccaattaagaaatattttttgtgggaaattagattcaactaaataaagaggataaattctccacaaatgggtgtatgcggggaattttctgtgacaatgctgccgtgtgaataattagcaaaggaggtagtttagaattaataacttaggtagaaaaaagatgaaatttgagttccagtcacattgtaaaaaaatacttgtaaaattaatgcatattatgaaaggcagaggttttccttaaaatgtgtgggaggtttgcaaccttgagtaatggcacatggtctaataggatccagaaagtactagcctaatgttttaaaagactctttaagataaacaaaagcacaaggattagattttgtttaataaataaataaaactgagcactagatcccaccaaaattcttgtaaatcaaaaaagagtgactaatcagcttaaaaaagagaagagaagagccacctaactgaggaaatgcaaggtctcttgctaaagaggtaaaaattacagagagcacacacttcaaaagatgttcaagttcatttgtgagcagcagaatgcaaattaggaccctttccataaagttcaaatgcaaaccagaacaaataacacattgcctgttggtaaggcaaatcagtgagtcgccacctgccacacagtgtccatttctatctagaagggcatatttggaaacagtaggatcaggcccacagtagattcagccctgaaaggaaagcaagtttgtttgtgggtcctgaatgtttatcttgccattgttttataattcatacagttgctatatgcattcttcagtatatatcacatgtgacataatttttaagtctatgacaaaaagaaagccaagccaggatacatctttctctctgttttcttgtgcatctagttccatctttaagagcaatccctttaaaagtgttggtgtaaaataccttcgtgtgctgtatctattgtagggtccaggtagaaaaagcccattcttctggcacctgctcaagtttcttcatgcagctctggctctctgacctctgttctgttggtggtagaagttgccttattgtttattaaacaaagctaagaaagataaataagttgatgtcacagaattacaatctaggcatataaaggaccgggtgttgtattgtacccagcaccatgtacagaaaggtatttaatacatgcttcttgatgatggcaatgatgaggagaagtggtacttcccgagaagggtgctggtttatgctgacaggggtgtgaacatgcaaaccataaactttgaggcacctgagtaaagtcatacttcacaacctctggcggtgcattcccttcatttgtgatggctgaatttttcccctggaggttaagcaagtagttttgtccttaagatcattcctcttagtgatattctcctctggtgattctggggccatgggggtaattccttcacctaaagatcccagagtcctgctgggaaacaatgatgaaggactggagctatcctatcatttgccttcccttagctttgcaaatttctcaagcaggcatggagaacagggaaagggggtaccgtgtttcaaatgaaatgagcttcctcagaatggtttatggaagggaaatggctcttgaagtaggtctgacatcagggatcaacatctgaagcctactgtgattgacaaagctacatgttgttgggcctaaaaaagactcagacgttatgctcagtgtaacctcctgagcctgacttgaatttaaagtttggacatgaggcccagtgtaacctcctgaacctggctagagtttggcaacttgtctttggcttgtaacctccacatgggagtgactcagcaaggcctgatgtaagactgtcccctgcctagctaactgccagcttggtggaatattattggccctttctcctcatgacaccttaccccatcctaagattcccatcccctacctcagccctatgtaagttcctgcctgttgcaataaaacaagatcctgcttcaacaagtctcccgactcagtgtgtttctccccggtaactaagagcggggcgaggtctgggtcggcgacactcatcatctaatactcatcaacctgatcagccccaagagaatccagaaacctgccactcgagcttaaggacgagtgttctgcctagaaggcaggctgtcaatgggagaaaagacaaaccctccccaaatggaagtctgtgtttatttgaattgaacaagcaaaggtactgattcccaacactccctagctaaagagagaatggacattgtagatgtgttcaaattatcttcaccttgaactgttttagtttcctggttttggatttctgtctggctccccttcattttctttcctgtatggaagggaagttggcctcaacaggctcctgcttctggcagcaagtggttccatctgagtcccacctctccatggccagaatcccctgcaggaatatcaaaagcatcaaagcatctctccttctgtgactttgtgttgatttttttgtatgtgtgtatgagcaacatatctggcaacaatttgtgctccattttcagcttttggttgctgctgagattcagtcaaaaagacagttgcaataaaatgaaccagatagcagaaatatgccagttgtaagaacaagtagagctgaaagcctgggactgagtcagcctgtcagcagagtgaaaggagaaaccagtcaactgtcaaggagctcatctccccaggaaaaactagctgtgctggaggtaggtcccacacaccacagagctcagaaacagcagttagggagtgatttctgggttcaaatctcagctctactacttcctagggctgtacccctaaccagttgttcaaatcttctctaagcctgtttgttcccctgcatctgtaaaatgagtataagttcataatagatgtacggcatacaatatctcatatccatcaattatctatctatctatctatctatctatcatctatcatttatctattcatatatctgcctacccatctgtcatctacctgcctgtctatctgtcatcaaattatcagtcatctatgatatgtcagatatctctgatctgtcatctgtatgtcatcatctatgttcattcattcttctatttgtgtacaggattttattagttggttctttgcaactattatgctatactactttcattttctcagaacatttctctgttaggccctgctttcctttcatcttcattgctgcagaaacatcctatttgtctgaattggccccccagctactcatccataggcatgagcctccactgggtgttttctcagtagcaagcactggtgactactttgccttgtaccccatcggccatatcaatgtctgacccagtagaaaggataagtagagagtgtgctcatctaatccagttgctggacaatcagaactgctgctcagagtggcctctcagcaatgtgtgggacatacctccctgtcaggaatgaggaataatttcccaagggtcacagactgttcagtccagagagatggctgtcattcaaaaacaaacaaacaaacaaacaaacaaacagaaaaaaacagatgagaacacagtccttgctctctgaaggacttttgcatttcaagaaggaacaaggaaccactgtgctagtcttggatgcactatcatcgagtcagattcaatgaagtcctttaggccagtgcttctcacaacctttgagttgtgacctccacagaaggtcacatatcatatatttttacattacaattcataacaatattatgaattataatataactgacataacccaaattatactcatgaagtagtaacaaaataattttatggttagggagtcatgacagcaggaggaactgtattaaagggcggcagcatccgggagcttgagaaccactggtctaggctctgggatcttgtcctcacccatgcccccactctgactcccaggagagttgctgtgggagataccggctaacttcagcctcctttgttatctgaactcgtgattctggaggaggctctgtccactcagtccgtgtgatactcctactcaagcctctggagctgccaaacaggtacatatcttccacagcccctttacatgcttccttcagatagatattccgatttcagagaaaagagaaccaacagtagcaaacactagtcttaactcctcatttttcccactttagagcttttgtttttcttagtgatctgggatgccttcattccaaaatgtagaaatccaatgtttactaaaataaacagtttacactgacactcccccatttctttagggttgaacttcaggatgggaagagttgggattccatatgagaaatattttatagacatcttgggaaagtataagctgaaagcttagtaaaataagcaatggtgtgtttaaaaagaaaatccaagggagagaggtaaaaagggtacacactggtgccagctgctgtggactacaaattctggtacacgctttctttgttatggtcctctgtgtcatagtagatgagaatttatggcacacagtgattttgcagataaacctgaggtcatatgtgaaagataaatattaaaataaagaacgagaagagactgatggctttttaacaaagcccaagcatatattttgattcttaagttcaaagacaatgaagcaaatacttgggtctattggttggctacttggaaatgccattctttctagtgttatgaagtattatgaagataagtaacattaaaataaatatgatgagccatgctaaaaggcaaaaagcacaagaatgtgctgaataaacataaatgtatgtgttttattcttataagaaaggaagaaatatatgaaagcctcaactgagattttttaaacagctttaaaatttttatcagtagcgatatatcaggatagatcaaaattttatgctcaactgttattaaattttattacaaatggctatattgtattttagggcaggactttttatcttgttttaagttgatgcaagtcaacttttctatttgtctgccttagggtagtgtctattgagctggcccagttccctggtttgttaagatgtctcccacaaaggggcaccccttttaaggtcttagcagagctggcttttgagaaatgcaccagtggcttttgtttttttcttgttctacctggtcatgtagacacaacttgggtttctagttgaatttggcagccatatggagtttgagactctatataaaacatccaaattggcagctccgaccacatagttgagactaatattacagtgactaagtatactctgggcaaaatgaatcaggaagaatggctggaatctgaactttcagacatactcccacctaccaccaatttaaaacattttccttaagaaacccactgtttatgattagtcttctggagtattcagtttttgctcatatttttacatggctgttattaaggctattgtactctctctctctctctctctctctctctctctctctctctcctgcatatattccactcactttcaaatctgctgttttcactttgttccccatctccttgttgaaagaaaacaccccaaaccaccacccagtttcatctgccatgagagaagtggttttgaatgaagtaaataaagcaatgagaagcaaggaggcacagtgtgttgactttagaatgatagtagatttaatgcatgttattcaactctgtggatacattgcagtcaaccatgtcattcaggttgtttgtgtagtcagatataatcaggaaacagagactctcaaaaccaaagttagcaaacagctacatcctcctgccctctttagacattataactttatataaggtacaggatttttttgggggggtgactattttcaacacagccatatgatcttttctaaaaggtgacagcatgcattctgaattatgtattccatatgtgtatatgcatgtatttctttccctgtagatagctgctcaggtattttcagatgtacctaactttaggcaaggagatcaaactgggattctctttgtattgcaatttggttagtcagctgtgggcttatgagattgttgggatgtataactggagtcatggctgttagattcctaatatttcatattggaccatgagaagttgtagggagccgtccctgcattctccattacaagatggcgcctgcatccggcaggcaccgaatgtaaacaagattattgtgcaggcgctgggtaattttccattccttgatctctgcctattccgtggcatcatatggcctgatgagctgcagccaatcatagggtgacacgtcccaggcggcggctgccagcctttattaggggacgggattcttggctcagggtctccgctctggtaagcttatgctctcctctcaagatgcattaaagcttgtctgcagaaggatccgagtgtcccgtgtatgatttcttgctggcgagaaatacagagagcgcgcgggacatatggtgccgaaacccgggaacatgtgaacatctccagcaccacggagacccctctaacgaggcggattcagaactgcagggtggtaaattcggagaggtatgttttttctggactttggcttgggaatgttgctattgtgggaggttaatatagaggcttctatgcttttactaggagctattttgacttttctcactgttgtagcaatcttaaagaagtccagaattacatatcagaaaccgaatgtggtgagagatggggcgcgcctaacaataaaatataagaaaaaaggacctcccgggatgtctagtgacaagggagtgaataatttgttaacagaaaaaacaacaaataagaaaaaaggacctcctggaatgtctactgacaagggagtgaataatttgttagatgattctgtaaataagtttaaagctttaaatcttgatagctctaatgactctaaaagctcaagagatggggttttggaaggaacagctcagctagatgagggagagacagagaaggagggagagaaaatagggaataaccggtcacaccccggtaaatttaggagagatgaggactcaaaacctagcctctgccctacaacgaaactggaagccttggagctgagcagctcagactctgagattttagactctagcaaggaagcagagctagagaaagaagcagcacgataccaccccgatagatatcggctgccaaaaatgccagcgggtgtgcttccatcagcacccccactatttggtaccgactcctttttaccatcagaggagcggagaaaattacagatggctttcccagtctttgataggggaaaaggccgtgcatgttattcaacactgcttggaggcctgggatgcctggggaaagcctcatatcctaaagatgctcaagtaatttatgtatgcttgttttaaaatgttctatttcctggtacggccattttgtagctggtcacatgactgacggtagccattttgctaaagttaaaaaaaggatacttagaccgccatcttaactaaaggttaccgcatggaaatcagaggtaccatcttagaaacaagtttttcagttaagatttaaaatgttaatgcttctatatattacagaaagaccttaagggaatttaaatttctttttaaaaccagtttttcaaatgtttgattttattaatgtttgtacttaaagagcttcaatttagaatttttaagcaaagcctgacaatgtaaagttcttgttttgtaaaagatgctaatctattatgttggtagcacacacctttaagctcagggtgttggtgacacacgcctttaagttttgggcgttggcggcatacgcctttaatcccagcactcgggagtaagagacagatggatctttatgagttcaaggcctgcctggtccggcagatcgaattccaggacaggctccaaagtcacaaaaaaaaccctgcctcagaaagaagttaagctactgtttaaggaagttcagctgtattacagaaataagactttacctagccacctgtgtgcttcttaaaaacagataatgggccggcttatacctctcaaaagttccagcacttctacagacagatggaaattacccatctaactggcctaccttatacaaggcattgtggaacgtgcccatcgcacacttaagtcttatttaatcaaacaaaaggagggaatgggagcatccttaccctcggtgccaagagttgcaatatccatggcactctttacccttaattttctaaacaccgacgctcagggccatacagcggccaagcgtcatacctcagaggagatggtaaaatggaaagatgtcttaactggtctttggagaggcccggatcctattctcataagatccaggggagcgatatgtgtttttccacaggatgaagagaatcccctgtggatcccggaaagactcacccgaagagcctctttggaccctcaaaagtcggaactccaccctctccccgggagttgagagccgctattatccagattaactcctgtccttgacggagagattgtcatcatagatagcttcagctgtctcctattttaaggaaatgggtggaggtgggattgtttggtgcagccgtttgctgcggattgatgttgcttctctggctggtctgtaagctcagggctcaaactaagagagacaaggtggttatcgcccaagcgcttgtagctttggaacaaggggcttccactgatatttggctaactatgcttaagcaataggccgctggccagacagctcttgcacacccggagcctaggctcattgcacagggtagagtgcctggcttgagcagcccatgagggatgtcgagcaaggcatcgcacagagagttgcccaatatgcaggcttctctgggaggcatgttgtcctgcataagggttgcctgccctagtctccctttcccagaaaaacggcagaggacaggtcgagagcgcttcgggtcaagctaacagcctgatggcgactcttgtacacagtcttaatatttgattgggaaggtacaacctctgcctctatccctcaacatatgggtgacctatttgcttgtaataatataaagccttttcattaattaataaaaaaagggggatatgtagggagccgtccctgcattctccattacaagatggcgcctgcatccggcaggcaccgaatgtaaacaagattattgcgcaggcgctgggtaattttccattccttgatctctgcctattccgtggcgtcatatggcctgatgagctgcagccaatcatagggtgacacgtcccaggcggcggctgccagcctttattaggggacgggattcttggctcagggtctccgctctggtaagcttatgctctcctctcaagatgcattaaagcttgtctgcagaaggatccgagtgtcccgtgtatgatttcttgctggcgagaaatacagagagcgcgcgggacaagaagtgatctgggcattgccactgccaacacagcactgcagtttgtatcatgtgagaatagccaagatctgtgtggtttagttgacccagtacccatgtaaatgcacctatttaaattagaactctactaactgtcattggagaaggtggtatttgagtgcacaagagcaggtggaccaagttaaatttgaggctgcctcagttatggttttcattgctatgataagatactatgacaaaagcaacttggaaaggaaataatttatttcatcttacaactccaaggttgtctatcactgaatgaaatcactgtaggtactcaaggtaggaacctatagccatggtagattgctgcttactggcttgctccccaagacttgctcaccctgatttcttagacaacttaggacaatgtgatcagggctggcattacccatagtgggcttggccctcccacttcaatcattaatgaagaaaatgcagataaacatgcataggccaatcttatggaagtattttttttcagttgagctcctcctctcaaatgactctggtctgtatcaagttgacatacaactaaccaacacaaggatatctgtaagaccatttgccctaaaatttacgtaacattctataccgtcttgaacaaaaacaactttgtctaaaatttacagactaattaattattgctttggttatcaacattttttcttcattttggattatggctatagatagtcaaaatagtcaagtttaagtgttaaaatttgttataaaataccagtgaatagccaggcattggtggcacacaactttaatcccagcactttgggaggcaaaggcaggcggatctctgagttcgaggctagcctggtttacagagcaaattccaggacaactgcaatacagagaaaccctgtattgaaaaacaaacaaacaaaaaaagtaaataatccaattaaaaataacaaaataaaatgataattgcatatacttgagtaagtccattgatttttttgtggtcatatgaactcaggctataatcaatgcatcaggaatctaaaacccaaattgcctatgacattaagcatgtaagtaaattaagtacgccaagtgggccatacaaagagacatcccattcagtgtggcagtcatagcaaatatacaagcatttgggcctaggttggtcaagtcttttgccttttgtagggtaaagcctagaccatgcagatcataatttatatccatagatgatgtatgtcttatgctttaaacttttgtttgaatcttgtctatttgggaaaacatttcttagttaccatgacaaaagtgaactctgtcttactcttagcatgttgtacagcctcccagtactgtctgcttcactcatgatgtagtgattgtgtgctaggtcatcacttcacttgctacattgtgactactcaaggataatggcgttcataaagcagtgtctggttctaggatgccgaacagtgctgaatgggttcaagagggatatggacacagtatctatctggaaagctcctagatacttaagtgtaatgacaaagttttatgcaaaagccacccaaaccctgctaccttgtgggcactttctgccaggcctcccaagttccgctagctgccacattatggtctcaagtaacacagagagacttatgttaggtacaaatgctgcttggccatcctgactaggatttctcatctgctagctcagtcttaattatcataaatctatatattttataagacttatcttatagaggatgcctttcgctggctccctctgttgctggcagatcacatggcaattccagagcagggaccaggaggaagagagaagggaacgacttccttcttgcccttgcttataaatgagtctccctgctatgtcacttcctgcctggatcactgcttctttactacatttcccagaatcctccttgacttctagtcctgcctaacttgctgcctcattggccaaacagtactttatttatcaatcaataagatgaacatatacagagaaggaaattccccatcacttaagagttgatttgatactttagcaaattatagaaagtggacaaggatgaagaatcttgacagcattttccatgatcactccttaccatcatcttaagtgtataattttccacactttaaatctaatcctcttccccaccaagtggtagcctattaaatactacattagattctggatgctatcaccttatcagtctttgagtccagggattttagcacagatcttataacatagtgtaacacatgcacttatgaaaggacaatgggtgagttgtttgtacatttgtcagtctgtgctctgtctggagtgctaacctgcagcattctacaagaacgtgtgatccttgatggatatttgggaaaaaaagccctacagagtaggagacagtggaaattgaagatctctacaaacaaaaatggttcattacataattttcttggtctggattttattgagaggtaaacttaaacaaagggaggaagaaaataaaacacaaaccaagtcctacaactgatatttttgttgactattttaagtttatagatttgaaatttttagaatcagaatccaattctttgtcactaatgatgtaagtctttaaacaagatagaggttaactgccattgctctgtatcaactgcattattgtacgataggcttgctaatactagttacacagccatttgtaagtgccctttgatgtccctggtgtaaaaagggtatcagaccagtatatgagagcattgtctactcagcctctaattggctgatgtgtatgtgatattctgcttcagaactgagttaatacagcatagaatgtgttttcctttgaggcaaagcagtttactgatatgtagcagatggttcttgctccttagcatgaatcataaacagatagttctcaagtcacatcactcacattctgaaaaatgttattggatttctcagtcttgagtggtggtgtggagagtagtgtgcagccatggggcacaaaattgttgccaatttccggtgcttgggtaatggcttggtattatttgctactattaatagtagtaattacaacattatattgtccccttcatgtcctaaaacagaatcctgtgaataaaagaatggctacttaatggtttgctatattcagtctgtttgggttttcatggttttaagtaccaggaagaagaatttggctaaagcagagtaataaaacaatcacacttcagcagtaatgtaagggcagagactgagctgcattcctctctggttctctgtacacacagatgtgcttctatgagactgcttatgggaaatgcaatcaacatctgtagatcaccacaaagctctggtttgggtcactttggggaataatcttgtgaacttgaatttatatactcttcaacatattgcaaaactaggctatcaacagtagtctaaggagagaataggaagccaagaaatacttgtataattgaatcaggctttttctcattgttactcaggctttacaacattttttttttttaatctgagagctcctttttttttttcacctatctcatgtatagggttgagttaaaagtcagtgtcttctttgtatatagaggaattaaacaataataacattaaatgacttgtcctgggttccccatgtagttactcgaataatcaggagggattggttgctcttcagatgcacaactgggatggaagttggaagtttcaagtatgaagaaattatccctttaaatatcacattccaataggagcagcctccagacatgctttctgatcactagaggaaggaacctgggtctgatgccctgctatacaaatgttaatgccctatgttgctccatgtggtgatgattgtgctgacatactaataaatctggataacaccaggtacctcatgacgtcaatcctcagaagactgggggtcagcccaaaggagataaagatgaaagagatccaaactttcactttaccacttgtctaggtcaactcacctatgcaggaacaggcatgagtgttctcactgaggcccttttattttgcattataattcacatgactttccacgtgttgttcataagaattactgaccactgttgagccaataagctagcaatgtctctgtagctttgttatgttaccaagagaagcaacttctttatgggggtaaactgcttcttgtttcacaaggtgtctactctttgaaattttgatgtaaacctcacctgcagttgtatctcttgatacctgacgtctctcttctggttgatagttaaatgtcctcaatcccctggttctccaggtagactattgactctttagtatgcctcttagaagcacccaatgtagatttcatcagtttatataggctacagttcaagtcaggttgctttaatgggaactacaaattgagtgaaaatccacttgatgtgaggtgtgtgtgtgtgtgtgtgtgtgtgtgtgtgtgtgtgtgttgcctggggtctcattttatttatataaatattaagaccagcatatctaaataacaagagtgacttgcttctatagactcaggatgaatttgttgggcagattctatctactgatctggacccatggttttgaaatcttaaagtaggttttgaaattatgatacagccctctagctaaataaataattctcaaacttggatctgacaaatgctatctaaggaatatatgagaattctccacaagagtttttattttaaccatagttaaaatcctactattacaagtgtgtagtagtcattttattgttgattgtctggtacgtatttgtctgtattttctttgttacagcaccacaggttccttcagaatccacctttctccctattcaagcacagagcatgagtgggatagcctccagccatagctctgggtgtcagctctgatgatgcatatactggcctaagagaggagcctgtaacctagctggagcccatgcagtgttatagccagggtttctttaacttataacccaggtgaagttgggttttcttctatttacagctaaaaggaatcctgacaggtatctagatcattaggatgaatttagtgcctgtgtttgtacaaatagtgccagtgtccttcttgccaagtggcaactttaattatctcaagataataagaaaataatagaggccgatttaatatgtaaatgatgcacattttatgaaagaaggtttcttactaattccacagagagaagtaagtcttcagatgatgtctacatctttaagcctgcagaagggaaggacccattatggtcatagatgctggacgcagatcacaagcagcaattagtgtgcttttcagtaacgcacttccatccatcacatcggattaagattgctaattaaaaacttattggcttggagttttgtttgtatttaatttaaaactttttagttgttagagagctagatacatacaggtttttatatcgataaatttaaggttgttcaggttggaatgacattaaaataacattaacgccagcagccccaagggaaatgtgttttttcattacagagactctgttcatctcttgagttttagaggtgttttcataaatggcaaacagtacattttaaaaaagactgactatggaattggataaacatcttcctatttggaacaccactgaaatataccagattatataaaaaccgacttctgaaactctagtcctcaaaaaggaatagctctcttctaagagagcaaagtattttgcagacataactgctcttcttctctgctcacctatgtgtgagttcattgagcaagctcctacatcagatatcaaaatgttttaaagctctgggaatctgggtccaccagtggcaggagcagaccacattgcttgtctcttgcagatttgccctagttgaagagaaaacccaagagttagctttggctggtgagggtgaagagaatttgtggaataagatgagtccaagggtgatgatgacttggttttcaatatgctttgttccttaatggatgagtcctcagatctcagtgtcttcatcaactttgaattcacaagttgtcccatgaaacatacttcacttcaatttcctgtcataccatgtcacaaggggccatccattttctagatggaatctttggatacacacacacacagcgtgtgtgtgtgtgtgtgtgtgtgtgtgtgtgtgtgtgtgtgtgtgtgtgtgtaaaatcagtgtcagtctgtgtttaccttctgcaagagtaatttcagttcaattccggtgagctctagagaagcctttcagtttcctatggcatgccagcattgctctgcatacagagaatcacaaaggagactcagtgatcatagtcttatccttcaagatatttgctttatatggagaatgaagagttcaaagtgatagactaattcagcagcagagatcatcacagaatacggtaagaagctatttgcctactctccaacaattcactgtgcatggtgatggtgaaactatttcagttctacttggttttcactacagcaaactcagagttgtttgactaaatattttgccttttcaggtggcttttcactggcatttctgtaaatgtactagtccatctagagaagtggacttttttctttttttttttaaatttgaattagaaacaaggttgttttacatgtcaatcccagttcccactacctcccttcctcccctacttccccccccccccactaataccctacctatcacatatcctttcttctccccagggagagtgaggccttccataggggatcatcagagtctatcatttcctttgggatagggcctaggcccacccccatgtgtcttggctcagggagcatccctctatgtggaatgggctcccaaagtccacacgtatgctagggataaatactgaactactacaggaagtcccgtagatttctgaggtctccttactgaaacccacgttcctggggtctagatcagtcccatgctggtatccaaaattggggacaagacaaggctgtccactctctccatacctcttcaatattttccttgaagttctagctagagaaataagacaacaaaaggagatcaaggggatacaaatcggaaaggaagaagtcaatttgcagatgatatgatagtctacataagtgacccgaaaaactctaccagggaactcctacagctgataaacaccttcagcaaagtggtaggatacaagattaactcaaaaaactgtagccctactatatacagatgatatacttgtggagaaagaaatcagagaaacatcaccctttacaattgccacaaacaacataaaataccttggggtaaccctaaccaaaaaagtgaaagacctgtaccataagaattttgagtctctaaagaaagaaattagagaagtggacttttatgactaaagagtgatagagaggcttccgtgctgagggatgcatgcagactgtcgcttaatcttgattttcatattttaaaatagttggtaatatctggggtcagcttaacttcctgtttaagaaaatgttttttgacaagacaactgcaacttttatttccacagctgcatgcaatggagagtactttctcaccaaccacactagaatatcattttcccgatggtccctgacaggttgaagacagcctgagctataagtaaccgtccccctccagactaccttgctcactgattctcagtgaattttaaatcctcagacataacaaaaataacatgggaaggagtttgttacctttgttagaaccattcagaggtgagaagggctaggatgagaatgtggatgaagtggtccagaatgaaagagactacagccttcagggtatgatgtgtttccccagaagcaccatagaaagagggttatagtttcagacctgaaggtttctctgttttgcttggcttcataattcagaccaatatgtctgagctgttaagaaccacacatgctctttatttaaagcctttccgtttttaccctttgcgttcttgccagacaaagcccttctcgtgctgctaccaccgagtccttccatttcttacttggaaaaaaagcaccttgagaaagctgctttgacttcctttctattgctgtggtaaacaccatgaccaaaagcaacttgaggaagaaaggctttatttggcttacaaggtcctcatcacagtttatcactgagggaagtcaggacagtaactcaaggtaggaatctggagacaggaaattaaacagaagccatggaggaatattgcttcctgtcttgctccccatggcctgctcggcctgttttcttataccatccaggaccacctggccaggagtaatactacccatagcaggcgaaggtctcccatatcaattgttaagcaagagaatgtcccacagactattctactggccaatctggtggtggcattttctcaactgatgttctgtctttcaagagaactctagcttgtgtcaagttgacagtagactaaccagtccataagttgttctacacaatgtggacagcatttgcctgaggaagcattccacaaaactgaggacttttgcttcaaggaggtgtctcattaaatttctttttgaggtcccatctaatggcacattgaaatttggcagggtgctaaatttgttgagaatttcagcaaaagtacaatctaatgaagatttaattttaggaggagataatgaaattaaggaagccattggagtacttactggctaatttatttctctgatatatttcatgaactgggatgaaaagttatggaggacaccgtgtatgtgtccacttgaatactgagagtgtattgcatgctttcataagcaatgcttacaacattgtcacagcaatagacccatgcttgtatactctttgggaaaggacacaaaatactacatgccttatgagaacagccacacaatcacagctacatgaaatgagtatattcatctatattaattatttaataattgtgccatgggggattcagagccattcagtctaaagtaactgttcagaattcaaaatttcaaaaatatgattgttaataaacattacataagaaataaaggaggtataaggaggtggtatagatattaggaaaaacttgctgcctgatgtctttgtaggaaggtataatcactattgtgggctctgagagaacttctcccccctccaaaaacaagtgctaatttttatttagcttagagagcctcatgtttattgttccatggatgagtcctttttggcaaatgtctgtactcctcagagaatacaagaacagaaaagatagctgcatgagtgactcatctatgatggctgtattgttatgttgacacaacttttcatacagcatggactcttaaaatgtgaaacatttgtgatggaacaaactgaggcttctctgttgacttctgggtcaagaattggaccaagttgtcagcacagcctatgctccagaaccatttggtagaaatgctctctgatcttttcccttctagttgaagaacattcctgtttcactcaaactccaggagcaaagcccttgttctgcttcttcattttgctccttccattctctcagggggtttgctgtgagactgtgacaagctttcctaaccctcgccccctccccaccccatcacccctgttctcaacctactttaaagtactgatttcaaaaacaagacaggaaacaaaagctcatcagaagcatatgcatttcttgttatacaaacaactagactaaatataagatttgtggggagtaacttttagtgtgcatagtccttaaaattattgccatacacatttctccacttgctacacattccattctttgtttgcttgtttttcttgttttctttctttctttcttttttcttttccttttttttttttttttttttttttttgagacagggtctcactatttagctctggctgccctggaacttgctatgttggccaagcttatatcaaagtcacagagattagcctgcctctgttttctgagtgacaggaatgaaggtgtgcaccaactttaccccactcttgagaagtgttcaggtgagaattagacagattcagaaaatggtgacctgccaggactgggagccatgactccagattgaataccttttctacaagatggagttttctgagggccacagatctatggagaggatgagtgtggcatcaaatgccattgaattatcataaggaattgtttaaaatgttcccattcttctttgaaacttccaaatacataaaggagaaagtccctgttcagtcctggtctttaaaacctctctaatactggtatatcttccctttcaacaaatgccagatgggacatggattacaatgcactaatttcatttcacatttactttatatttatgttatcataaaacaattttataaaccagataatatatatgaatggactttaaaaatcaaaattacaaagagatgtttccttgtctttccccccatacattttttacaaaggcaattgtaattatggtaatagttttattggcatttcctgagacatattcatagaaaatgtatgtatatgtgtatgtgtgtgtgtgtgtgtgcattagtatagatatattaaaacctgaacattaatattttggtgtgatggttagctttaccaacttgacagtccaaaatcatctgggaaaagaatctcaaggtcttctttttaaaacttgggttaggaggctggagagatagctcagtggttaagagcactgactgctcttcaagaagacccgggttcaatcccagaacctacatgacacctcacaactgtctgtaactctaattccagggaatctgctattctcacactgataccaatgcacataaaagtaaataaaaaattaaaaaaacattgggttacacttgggttaggatggatctattgctattcaattatttgatgtgagaagacccaggccactataggcatccaggcacagttcctaggtagggagttctgacctaagggagctgaggccacatgagcaaacacatatgcattcatttttatccaatcttgactgtgagtatgatgtgactaattgtctgaagttcttgccttgacttctcaacaatgataggcagtaacctagaattgtaagctgaaataaagctttttctctctgaagtttctttctgccacagtattttatcacagtagcagaaaagaaactagaacaattgttcatgctgtttgttacatagcttctttcctattaaatgcattgtgggattccagagttgacaagattttgaagctgctctgtgtggcctgctatctattgcgaatcacctctgtctttctctctataactgaaaaccagacatgttactgaaaaaatgaagtaagagtgactaggtcacaagacctgtgtctaatcatctgacttgcctgtacatgttttcccccacttctctttgttttgtcttttcccctaaacttttttctcttgttaaaatatgttttcaattgaaagaaaattacattacttttgccccccctttcttccatccatcctctctcagccaccatcccttaaatctctcccatgtctcctccccaccgcacaagttgacagccttttttctttgattattatcgttatataatacatgtatgtgtatttgtctatatgtgcacacacacacacactcacacacacacacacacaaatgcacacacacacacacacacacacacacacacacacacacacacacaccctgctgaattcatccttgttggtgtgaatgtggtttcaaggatgaccactctccattagacagccaataagtggggtcatccctgggaaaggtaaaaatctccttctcccagcagtcagtagttggttcttggtctaggcggggactctgagaaaagtttgtccctttcatgtgaacatatccattgatacagtcgttttctggccttgtttatatggccatttctagaaaagactgtcttgcagcagacttgctggtattctggatcctgcaatcttaccaccccgccccccattatgtgatgcttcctgagccatagatgtaggagctgcaatgtagaagtatcccttgaggctggttttcacatctgttgattctgcatgtgtccaactgtagtctcccataatggtctccatttgttgtaaagaaaggcttcctagatgggggtggcagcacttatctgtggttataaggataagatttagaacatagtaaggaaatgtgctgctctagcacagtggttgtagcagattcttttctaaagtccatgacctcactagcccagggaaaatagctgagtttccagtacctggcatcacatctctcttgttaagtggccattaagtctaattggactgttctttgttgccaccaacatgtgagcatgacttattgtgccttcatgcctatctagccatgctggtagttatgatggttctatattagaggaagttcaaccacttggactgataattctctgcacaagaaccacaggcaaacaaaaggcccagtacaaagcaggagaaacctctttttgaatggtgggtcagggaggttcaggtgactccccaaacaacagagattattgatgtagcccttggttgtctttcaggagttgagggtgggtccttattgccaaacacttatgacacagggctcagatgattcaagctcaatctgacctggaagcctctttcctgaggtctagcttccatggttccagaaaatattatgcaagctaccaagggaggaaagcaattaagagtccggcccagatgcaatccactccccctacttctcttgaaacagaagaaagaacagactgtttctaaccctgtagaaggagatctgcaaggagggacaatgttaataaaccttttcatctcctaacggttgaaagaacccttgaacatgaatcaaactaacaagagggtgaaatggtttttcctaatggctttctctctgggaagcagaggtagatttaacaaaaagatgccaatagtctgatttgctgagttccacgaaaaagagtccacaaactgctgccatgtggaaaaatttttctagcgcagccatagacagtcactactatctttagttacctgcttttgcccatgcctaaaagccatgcttttttcttcattaaaaaaatgcttgtccctaagtgttcactgcaaatatattccagcaggacataaacaattttgaagctcatctagctgccaatttctgtgcaaatatgcagcttctgataatatgtttaaaaacatcacccaaagcctcaggtagattacatgcaagcatatctgattatctttgtttcaatactttagcatcaaacaagcaacacaatcattagcttacattcttcaatatatacagtcaagggtgcaggctaaatattctgtggaacagagaaaaaaaactacttctgtgtaccacatgatctcattgatctctgcttctctctacctatgtcccagatgaccttgtggatgtcagctgatctttagccatgtcttagatgacatcatggatctgtactggtttctggtagaatgttggaagcctcgccctagaattggaggtgtgttaaccacaggtgacctaaaacagatatctccccaccatggagaggaagaattcatccaagtacatgaaagatcaattaattgttaatcatcttcctaaattacatagcattcttctaattccactagacatcatgatacaataatgacaatggtattataataagatttttttattattgccatctccattttaaaaacataattctttattgattctttgggggatttcctatcatgcactccaatcctgctcacctcccagtctctctatatcggcccctcacccctgcagcatgtcccacaagagaacctcccccaaattaagaacaaaacaaaacaaacaaaaaagatatctacctcattattctgtcttttcaacacctctttattcatcctagtggcatcaggagctgtggtgtgtcacacagtatgcccttttgttcttatcccctatccccaaagtgttcattgcaatgagccattggtctgcttcaaggcctccagcaccccatcatcactggagcctcacagaaactcctcttggataccttgctattgccccaggtcatagcaatcctgaagttgctggtctgtagcaccagtcccttcactccagccagtcatagatggagtagaagttagagtgggccaacccaaggcccaggatatggatctgggcagtagctgagctagtctgtctgagtcactgggacaatccccctcaggtgaggaccagagccagctctcctaggcccatgccattggtgttagtatttaggcatttgtactggcctgcttttggagtactgacaggacacaccctcagctactgccacaaagagcaccacctgtgcctgttcattgtattccctttaaaagggtcctgcccaccctatccccccctctgtctctgtctctgtctctgtctttgtctctgtctctctctgtctgtctctctgtctctctctctctgtctctctctctccctctctctttctctctctctgcctctatttcctctctctcactgttcctgtccccagaggccagggtccctcctctcctttccccttttaatgatcctttttccctaataaaaattccttctgcttgaactctgttctatagcatctttctctcttgagctgctttataaaattacaacagtcagggccagctctcccatgccagtggtgaggaggccatctctcctgagtgcaggagagggggatggggaccagctcaactgctaaagtgtccagcaaggggtagggccagtgaggggcaggacctgattaacatggtcctcatgtttcaacaggcatggttcccatgacctcctgtgataacatgggctatggacattatcacagaccccagctgcagaaggaacatggatccagacatggcccctggcagaagcttgggcccagacatcaccatggacacagtggcagcacagcccatccagataagtatgagaggcaacaaggccctcagacagcaaaatggtttcaagtggctttcaagaccctgagcatccacacagaccttggtggcaataggagccatggacatcaacccagacctggctaaggtagggccacagacccagacatagccctggtgtcaggcctggccaagatgacaccatggtcctaggtgacagagcaggccactcaaattggtgtggtctctgtggtggcatgaccttcaggcaccaacatggcacagattgtgggctatacccaaggtttccatgtagcctttggtggttccatgggccatagacatcaacacagatccttgttgtggtaaggccatggacccggacaggatcctcatcagcagcgcaggccactcagattggcatggctccagcaacaatgtggccctggggtaccaacatggccctaggtggtggcccagaccagtggcattgtcatggccttcgatgatatcaggagccacagacatcaacacaaaccctggctgtattaggatcacaaacccagacatggcccctgcagcagctcaggcctggatatcaccctggtccctgatagtaagcctgccaccaacaccaggccattcctcgccaccctcactttttcagaacagccagcctctctttctcttccatttctccaccatacacatgctcatcacaatggcacccacaactctaggcgggcctatggatgccttcaggtaggctggcccgtacccatcttcattttacattaaccagaaagttggggttcaaagaagtttttaaagtttgatcatgttcatacaattaaagggaaaaaatgaattaaaccatggtcctttgattgcaaatcatgaattgataacctcatcttcctaatggtgggccatgaggttcttttcctcctcttccctccctttgctctcccatgccctcccctccctttgccctctcctcctctcctttccctcccttcctcttccttccccttcccattcctttagttcctttcttccctttaccttccttttctccccttccccctttcttactcctattgcctttcacgtgtcatttcccttcccctcctctttttttcttttctgacacaggatctcacaggccttgaactcatgatcctcttgcctccactcccttagtattagagttacaggaatggaccaccatgactaacagtgtgatgcttcttaaaccatcttttagtctattctaactccagatagcatctttatgttctttaatactaagattctatgtgaaaaacttaggtggagagaagatgtatataaatcataatatctgctttatttatttaaaaatattgtatacaggtattgaattatcatacctcataaatactggcaagtttatgacagtaaaggacccatagattgaaaagggagcattcacactgattttgccaattaaacatattcctgggggtgggaggtagagaatggatttggataaacattgaagctgatacctggataactgaaagaaatgttcaaaagattatgaatcggaatttattttgtgttgtgtaactgagagatgatcagggtactgtaggaaaccatgtcccagggaagttacaggttttgagtttaaattattgaggttttgggtttatgctttgttgcccaaacagaggtgacataaaacatctttacttgtgctcagccaatgaatctgtcagctgtctccacagaaagaagtaaaatgcagtcactcatgtgctttaagggaatgccagagcacagccatgagaagtaattagtaattagtaatcccagttatccagaggcagaggcagaggcagaggcagggaaatctctctgagtttgaggccagtctggtctacatagagaattccagaccagtcagaaataaatacacagtgagaccttgtctcaaaaaaatcaatcaactaacccagctgggttgaaagccacagtactttttaaaaaaagatgtggttaatatattttccacacaaaatgcttctcaagcagctttcacagagatgcctgtaaggaacagtactctgcatggtttttgtatgagggaactggacagccatgtcctctcctgccaaagtctcttcccaaaggtactgttgatttcaggctctctgctctgtatgctgcagaagacatctctgaagcagcttgcctggttgtttttctaaatacagacaagaaggtaccaggtctcttctatgatgagaacacttttttcttgagcttcatttttacccataaagacttttaaccttgagtagccaattccctcccttaaccacacttccctcaaggtattcaagtgtggcaaaatcaaaggacatttgtctaaaatatttgaggtctatcttaggccagataaatgccgttatgtttgctttctgggatcaaggttaatgggaagattacccctgtttcaaatcaggcatgctgggaatgaggcaatatactccacacagaaggcttccccctgcccccctgttagacatcattatctggcacgttacaactctgattatcacacctttgaatgtcatgtgcctattttatttgtattgccagctgcagttttgcagaaagaagacaaaatctatcaagttggacaagacaagttggcttggacctcttggctgtgggcaataactggcacactatgctcattaaatccagagtgattatatacccattagtctgaagtttgcatctgtgtagacagttgagtcattttactaattctcttgagatgttaacaaacttggaaccatagatactttaaaaaacaatgtaccaaggcactaggagaatgtcaactaatgtgacttccttgggaaatgtcagatgacatcagtgcagcaggagggctgctaacccataggacccagaggctcaggcttggaaagctgcagcagcttcatacaggctctggcagtggtctcccagacatgtgatcatggtccagacatggctgaagctgagagacttgtggaagcagagcccgagataagaaatagatgcttgtcaccaaggtgggtcccctggtcaagaacatgaagataaggtctctggagatctacctactctccctgcccatcaaggggtctagattactgaccttttcttatgaacatccctttaggagcaggttttaaggatcatactggtgcagaagcaaaccttagctggccagtgaaccagggtcaaggcattcaccatcattgaggacaacaatggtcatgttagtttgaatgttaagtgctccaaggaggtagtcactgtcacctgggaagaagctagtagggaaactagaaaagtagcacaagttaagctatcattgttttcttttttagttcttgagaatttcatgtgagtattatattgacatagatttttcccaccttctttcccctccaactcctgcagtatttctcccctcattttcaaatttatggccttttattttatgtatacataaatgtatacataataattcataatcatatatacatatatatatataagattatgaataaaatctactgagtttgtttagtgttgttttgtgtgtatgtatttagggatgataacttgggattggcttacctgtagggaaatggtccctagagaagactgattcttgctctcttagcagccataaattgcctatagcttttcatcttggatggggccatctaacactgccatgccaactgatgttgtcattgtgcaggtcttggttagtcatcatagttatatatttatggggttctgattccctgtcactctctcagcagagggcctggtcttctggctcttacagtctttctggtccagtcttctgtgatactctacgaaccttctgacagaggagttgttttgtagatgtatctattaggggatgggcaccccactgtcagttgttctctgtttcttgaccagttgggtctttctgtagtggtctctgtttgctgcaaaagaagcttctttgataagcactgaaagtttacattaatctgtgggtgtaaggattagtattcagaatgctgctagaaattagcctggtttaggaaaatggcggtagtgggctgttctgtaactccatgatctcaccagtcacaagcatcttgctagggttacagtaccagacatggattcccttttgctgaattggccttaaatccaattagagggatgttggttttatctttgacatgagtgccactattgcggtccatagggtttacagttggataagatcattgactgattttctcccatggaagcttgcctagctccctttgatacaatgagagctagcccccagagaccaggcttctcagtcagttcaagctttattccttcaaagcctcttcctaagtgtgtggcatcctcagcagttgggtcttactttcaatttctgagacgaaaccaatcattcaatattggctatccacagcctttatctcaaatctcactaggctccccagaattgtgcaagatgtagtaagctaatgatcatgaaagtataggcccataaactatattttcactcatgatttcaagttccctgtcctaggactactgggaaccacgtaactttctccagttttttcctcctgttgtgattttcaggctctcccaggggataggtcacaactatttcatccatctcaacatttctgagaatagaccatgccaacagtcagcacaagagtttcttcagacatagtcctgagctttaggattcaagcaggccctttcaatgcaaaaataaacacttggctccataagtcttgaggtatctataaagacaaattaatattaccaaaattggccataaccaattttaattattatttttgctttaatggatgagaaaatcaataccagcacagagatcgattcaataaatccactcactttggggaggatattagtctttagttagtctatccattcaaatgttatctttcaaaccttccttcacagatatgttaccatgatttggacattaagtctcccctaatagggctcatatgctaaaaacatggcccccaaccactggaataattaggctaccaagttaatgaatagattaatccactggtgaattcttaattgaatgggctattaggaggtgtggcctacttggaagacataggccattggggatttgcttgtctaccccctttggcttcctgactgaccattctctaatttgtggagtttcacctttgccttaggcagcaatggagccagatgaccatgagagcctttgaaaccataaactaaaatcagtacttatttaaagtgtttctttcaaatatttgtgataacaattaaagacataaaacacacttccagttgtcttggcatcccatgatctatcaaattgtcacctgcaaataagtatcgcaccacatcttaatgaaatgggacaaatgtgtaatatcaataaagccgctaaacatcactgccttccaaattccctggggatacttttgccttcaatgtttcctttcttgatctcttttgcatttctagaaaatgaatcttctatttctaccactgtagattagtttgtttactctacagtcttaaatataaggctattttgtaaaactcagattgaagggttgcctttattaatgtttagggctcagcagttctttccttttttactgcttaataggtctttattgatggagataccataagttatttatccactacttattgtctgacagaaattcattttgtctagtttgtggctaatctaatgcaaataattatactgggaggaatcatgccaggcaagacagttaaaaacaagaagaaatagttggctgagtcgtgcattaagtatatgcatttctctgcccctttatctcattgaaattgctatggaattaaaaatattctttacatatttctgtcaacttttagtacctataatttgaattagtgtctatgaagaaatgcaggcaaggagtcataagaagttcctcataagttctcccatttaacatggaacaaaacttgcattattctgataatatttttgcctaaattacttttcctaatatttatactacttcctttggttgatattttatcagaatgttttcttttaccatttccataatttttaaatagttaaatcttaaattagtaaaaatttcataatagtgacatataaccatacttttattttaatttactaattaatatttttgactgtgtatctgaatgaggtgtatagatttgtgtatgtgtgtttaaatgagtgtgcaaatggatatgcaggtgcatgagtgtggatggccaaagttgatgtcacatgtctccctcagttgctctccaccttattaattgaggcaggatttctcatggaacctgtagcttgctgactggttactttagataaccagcttgctttaggattgcctgtgtctgtgtcttgagtggtgggattacaggtatctgatatgtttgtctggatgtaaagggggttctgggaatctgagctccagtcctcacacttgtaggaaaagctcttgatctcctagctattccccagcctcataaccatcatactaaaatgtcaacttatgctataatgtgtaacaaaaaaaacccaaagttctatttttaccacttcttaatcccaattttcaagaagcagtgtaacatgatttctgatagctcttaataataaaagcccggagtcaaatataggggagcaaatgatgagaggtcagagacacaaaggagcaaaaccatagcctccttacctactcaacttcccagctgaaaagagagtgagttcctgtctcctcccgccttagctcttcctctctccacccagccatatcacttcctgtctgtctgtacagacctccagacctctctggttaacgagtgactagctccaccctctgatcttcaggcaagcttcatttgttagagtataaacaagatattaccacaaagcatacatttaaaattgatttcagtttccaaaatactacatttaaaatgtaattcttactttatttttccaacttggggcattatgatttgtaagtataattttaggcaaaactccattcccaccagatccccttctactataaagattatataattcttgtcttttccagaattaaccggtctcagtctactattttcttggtgatccatcactaactcttctttaaactttctacaagtagtattgctaggctatccagctgctctagttcctcttttgcagtttctgtggtcctctgccctgctacaataggttggagtccagactgacttcttagtgatgtgttcttctccctcacttgccttcttcctcctgacctccctctccgtgttttccatcttttcacgggactcatttttatttacctcaccctgtttcccaccttcaagcagcaaacgacaatggatgaggagattgacataaaaggaaaagcgttatctgggtataggaggaagaattgcactagagctagtgggaacaaggagggggagatcgggaaggacagcgtacatgatatgcttgaatgaaagtaacagtctgatttggggtggtgaatatctgctaatacatttgtccattcagtaaagtacttgccacattagcatgaggagccaagttctatcccaagcccccatgtaaaaacagttagattgggcagtatgcacctccactgtcagcacaggggagggagaaataggaagacccacacaacttgttcaatcagcaagctccaggttcactgagagacttcctttaaaaagccattgagaaagataaccagtgctgatctctgacctctacacacacacacacacacacacacacacacacacacacacacacactggtcacagcttgttcaatcagcaagctccaggttcactgagagacttcctttaaaaagccattgagaaagataaccagtgctgatctctgacctctacacacacacacacacacacacacacacacacacacacacacacactggtcacaaagtggaaaatgaagaggcagttattattattacaataagggcacaagatggtgatgtccacttggacttaggtggtaatagcacagatggagaaaatttgacattttcaaatgatatttaacatgcatagtccttgtaggttgggcaataatgggaaaaaaaaactgagggatgagtaccagcattctagctggcgcattgtggtgctccttatagaaactggagcaccagagggcatgagggaggaaggcaaggagaaggagtacgagaaaaaggccaagttccatctttaggcaatggtgatgtgatcgattatgtgaaatcctgtttgctgtgtgttttctaattgtgtacccttgtacacgcagtggatgacagcaagtggctcctgacagaagcagcatgagcaaatagtgtatgccaccttcttgtcacataagtatgtgctgagttatagagtatggctgaactgtcatctaaagcctgctatttttcaaggattaaaattaatacaattgactacctaattatctgctccgatttattctgtggaattttttttcttgtagttttcctcccaagaagaaaagagatgtctgtttaagcagatggagttgggaactgaatggagctattctgaaaacattaggatagaaaacaaagtattaaaactaaacaacaaatccagagagaaaaaaaatggctcaagcttacttaataagacaaaaaatttcactaaggaattattgagaaaataatgttttgaagacacttaaggatattttatcttttctgaacactaggccaaaaaggaagctggaagacagaaaatgcaaacttctccattcaggagaagaaagagagtcgtgaaacacaggactgcagagggcctatgtctctctgaaagaaactgaatcaatggcgctgagttttttgctcccaagtcacgtgatcctacagaatcacacgtatacatgtgttgagttacagcatgttgtgttttctgcagggagaaagaggatcaagaagggaaatttaccacaggcggcagagacatgactcatggctggtgcaaacagtctaacaaaatgagccaattccctggtgactcctcatcatccaggaaagattgtaagagcacatttccttcatcttaaatcatgtgcaaactaaatcacatgcttgctaacaaattcaggatggtctcaggctctgatgaatctgtaaggagtgaaaagcaatcttgaaagatgaatctaccttttctgaatttatgcttcacacacatatttcttggtcattattattaattttagtatcatattattattgaatcatatatcccctcaccaatccattataactttgtaaagatgattgcctattaaaacagaaagatgaagaataaatcaccattttccccttctccagagttaatgcaaaatgctatgttgaccatgataggaagtcctaatgaaattatttagattcaccctgcctaatggtctgcgtagtggcaggtgctatgcaggcaatgtcacacacactgtctcatctggttatatgctctgaacttactttttccaaatttgagggaacttggaggtctctacagaacccttggctaaatttttaaagtactgaaaattttgattgtgctaaaaatgtcaaccaagcagagtggtacatgcctatagtctcagttttccaaagccccaggccagaggattcctgtgagtcctaggccagactggctttcacagtgagtaccaggtggtccagggatacagagcaaaaccctgtggaagaacagaagaaacaccagtgcccttatcgcagggggaaagagacaacatcttctttgttacttgacaaaggtgagagcaaggggaactgcatactaccacaaacaggctcttcaaatgggagaattactagaagatgccctgcaagctagtctcaaatatcagagaattcaatggtcattagttctgaggcatttggttagtatggaggattaattttttttctttgtgtgtgtgtgtgtgtgtgtgtgtgtgtgtgtgtgtgtgtgtgtgtgtgtggtattctatagataggtctgaatgatgaagacaggggtttgctttaatcatccatttattcacttgtgaagtgactttggtgacaccctacttcataggtgatgctgttgtaactgttttatcttcataaaaatcaaggtgctgtttaaaggtcctgatatcaataggcaagtactcaggttttgtgttaggtaccgaccgatacatagaaatttcgtgaaactgacaggtgtcaactaatcagaatttaagacaagggcagtagtaacactgagttactctgtcacacaatcacggtccaggaaaagaaaaacaacaacaacaacaaatcctgtgtttgtgctttgtaaatagtgtcagaaaaaaaaagaaagaaaaacaagcaaacatatttctgagttcagtattttataggaatcatgactgcaatggtgaaccaattctgcagttgagtgttctgtaaagttcatttgggaatggagattttgatcttttatatttaatgtgaattccagtaagaaaactacttgcaagaagagaaatagaactgatttctccattcttatagaacacagcaaatgctggcatgtgagacaaaataccgtttggtaatacatgtattagttttagaataactattttaatgcttccccaagagatggaaaaatttatgttggacacacttgcggcttcaattgcatgttgcaaaaggctctccggggtctatggaaggacattcgaagcctcgtaagacagcccatgtgtactcccctcttgtaatccccctgctttccttgtggggattttttagaaacccagaggaaagaggccataattctgtcaacaccacacaccacaggagcaggcttgggtcttgatccctggaagctgtgcagtggagcttgagttacaattctgcaagaaagcatgtggccagggtagagtaagggctttgtgccacgaaggtcattgtccctaagagctgcctgaggcagccagctccctggtgttgctttaatgatgttctgtgaatacctcagatctccagggaaggagaagggaaacagtccttgctaaatccatgagctcaagcagaaaaagttttcagctctctctcccagcttgtagaataatgaaattatatgaggtttcgattttattgtaaatctcttactgtgtggaccaagtgagtgaggactaaagtcttgatgtgacatgatcagaagacatgtgtatgtcaggactatttcctggtgaccagagtgtaatgcttacacagtttatcttagctgtggggcctggaggcaaaccttagtatcaggggtttcttgtactctggccagtagcttccctgagagctccagcagatcagtggatggaagatagtaagggcaagagtttgtttccatggcaatctccttgcagggtggccagagagaagttacagttgtgtttggtgactctcaacattctctgtttctgtctgcaacaaactcaaccttaccataccctcgaagcaccaagaaatggcagtgcatcattgccactggtcttgagttgcagaattcttctctggtgttggtcgagtcaagaattgggtatactagtcaaattgagttgacactggctggtcctcaagcagtgaaaacaggatcctctctgttccctgtgacttgttgataagaatgggtttctcttcattctgtttttagtgtgtttttagtgtgttaaaaccctttggtgtgtcagtgatatccaggttccatattaaaaacagatcattagtataattgcttgaagcctagttcaggtttacttgatgttatttattttgggggtgggtaaaaatgagctgctattttgttattatgaaaaacaatgcttcctttctccttttcattcctcatttgtacatcattctctgttaacttttcattgttcaaatctgggcgtctctcttcctttctcaggtttctttctgcctctcttcccatcccagtcagatggccttcagttgagtaaaagactcagtattattcttaagaatcttccattcatctaagttggctgactgtggtctccatcagatacaaaatcatcctggcaaaagccaagcgctacatctaactgaaatacactcagcaaatattttcccatatttttttcaccccaatcctccaggggagacagtgcatggtaaaaccttgctctaattccttgtgaatttatgctaaagcacgagagagaaaacaatgaaaacaggaacattcataatataaccataatgttttgaatgcttcagacactctgcttaatcctttccaagaaggattttatttaaggctcatcttttttgtgtagtaccatcttatgcttaagataattaagactcagcaagagcgaagcatgttgagttaagggaaaagacagaccgtgaactcagggctgctggactctgaggtctgcatggttcttgactcttccctacctcttctatgtaagggaaaatatgtgcaacttacttaagttttgagaagaaagaaatgacattcatcgaaagcacagatttggagaagaagaaaatgtgtttacactgcctttggtagtaccaatcagaaatgatgagggtagaaaacagtcatacagacccttgtacgctttcagtgttctcaaagctgatactgggccaaagatgtaaatatgagttcagatttccaagggtgcatttagttctttttacactaatccttcccctattcaatccttccttcctaatgtgtctgctaagtgtgagggattaacttcaaattctaaagattatgcctcaaagggtttaatccaggaaatactaaagctacaatttagtagctttgattgagttggtatgttccatggatgaacatacagtcctcctctgacatttcccaaactcagaagccacattggaattgtgatatgataatatgttgggaacatcacttctttcctagttcattagactctgggttgatgtaccttctgaacttaggacaatgggaatcacttgtctaacagggacacacatagccattcttaaaaaaaatctgattctcagatgtcataagactggattacatttgttttctgcacaccctacctctccctccctagtatgaacagatacagccataactaacctcaattctctctatgagtatctggataaaagtgacccagtgagaatggctgttgggtctttccgatggtctggaatactcgtaggctagtgacttcccacagtgccttgtaaggaaccagtacttgttgaatatttacaaagtatcacacactgagttagggaacttctatattgcctccttaattcttagagccacacagagccatcactagaaactccaggttaagagaatttaagaatctcattcaaggtcagatctgaaatcagaagctacacttacatgacatgaagccagtcctttacttagctatgaccaggcatcagcactgctctttggcaggtttgcaacactgaaaatctgggcgttaaatactgtgtaaggtcacattgtaactcaggaatacatgcatagacaggtatacccagacacagcagtatgccaaaatcataacagacttctgagtaattctgagtgtcatctgatggttagaaatagatcatgcagtagcgaagtacactttttgaaagaaaaaaaaaaaaagaaccaaacattcagaaaaagtgactgagcctttcaatttaaagcaacacaaggaattgttattagtattattgttactcacagcaggctactactgaagcttaccatttatttttggaggtgttcatgtggggcccaggatgtgccagatctaggaatcttcaaaataatcagtgaggcagatgatctgtaggcttgttgcacagacacgttgtatacagacggtgtcctgccaggaactgttaaagagctatctcctgtctccactgctgcctttttctgaaaacagcctgactagtcaggggcaagaattatattcatgggtttgctgaaaatcatttatgactgtccctaaaagcaattgatgaattccattttaaagacatggctcgacaagttctttctccaaaggtaaagagtccagctaagatgacgtgggtgtgtcacctggggactgagattcatgtaggataaagtctaaatgtctatggatcctaggtttgaccatgtactctctagaaattagttgacttttgcaatgtaggaaaatattctattggatttctctgaggtcacaacaattcttgcctttagacttcatagccatgaagtggttgtcaaatcttactggatgatgctatgtgcttgtcaggagaaagtacatcatgtgacatgcagaacatgtgttgaagatcctttcccacacaagccttggtggcagttttgtggggatccttggccaatccaagctctttatgaaactttgaggtaattctgtttagtaaaaccctttgatgtaaaatcactggatcccaggtgattgttaataaaaaataggcaacagtcacatggtaaattgtgttatattggctgctttattgggtagaggggagctagaggttgctacagcaaaaaaaaaaaaaaacaaaaaacaaaaaaaaacaaaaaaaaaacccttcatttccatagttttggacagaagctgtttactttccatctatgttgtctgttgttgtgtgtgttttgtaagtgtcctcttctggtagttttttttttcttgagactcctcaggattcaggtatccaaccttctctctttgtagctcagtggaactgggaattctttgccatccatggtaaacgttaaagatcagactcgaacatggctgcatctttcccatcatatccaacctaaaggcaggagagacagaaaaagatgaaacagcaagctactgtagtaaacattggtttgtttgttttggttttgagtgttgtgatcagagtaggggtagaagttgatgggagatctttggtttggataagtgaaggactagtaggaagaaaggcaatgttaaaccaagtagtattacagaagttaccccaagacacaaaaatctcaaatccaatgatttgcccattggagattagcaaggttagaactggctaaccagattcctaaattaataaaaatgaataaataaaccaaccccatataaaactgaggaaaccttttttttcattttgtttgattgagttgataaaagtaagaaataacacaatgttatagctgtgtagctgttgtgggtctttggtggttggtaggtaggaggcttttggctatagaaaattatgatatgtttgcaccatctagggcattagagaaaatcagggaatgtgaaacaagatttttatgtgtgaatgtagatctgaaactagatatttatattggcaattgttatgtatgcaaacttttttggtaccaagattccatttcccatctctttattatagtaaaagcatatagtaagatgtgggcttcctaatttatatgtatagtacggtgttgtcagcagtgtgtcagttgtgtgtcattcatctgggaatggtcatgaagattgttaccacatttggctactgagaatagtgctgcaatggacatgcggtgcaaatattgtcttaagatccattttcaatggcttcttgtaagagctcagttggattccttgaacatatgctagttttacatccaacctaaagcttctattcagtgaaggaaacaattagcagagaaaaaggtaacctacaaaatacttgcaaacaattcatctgataagaaattatcttagatacatatggtgctatatttgaataacaaaatcatcagcctagttggaaaatggcaatgaacatgaataggcatttttccaaacaaaggcacataacagccaacaggtacatgagaagacactcaacattaacaactatcagggaaatataaaccaaaatctcagtaaaatattatctgatggtcattagatcaccatgaacaaagcccaaacaccaagaaataccaggagttgacaataagacagacacatttgaacactgccgcactgtttgtgggagtatatagtggggaaatcacagtagaggtttgcacttatttcctcttactaattatagcaccttgaaaaaaatttgaaaatgttatgtgtctcccttccctaaccatgatttttgtgtgatacttgactcttaactcttggagtttgctgtagtgattggtgcagcaatggcctattggctaagctggttgctatgatgggcttggaaggactaagacttaaagtgattcccactcctattgaagagctgcccaggaaatgtcagaagctccatggattagccatctagttttctgcattttcaagcactccatctcttcttctattcactctctgtagttattatcttacatcctctttattttttacaacccctaagactttcttgccctcatttctctcaattatactatcatatcttcatccacccactcattaaaatctgtgttctttcctccctcttttgtgatccatatttgctggctcacagctcttgagcactcatgggcaccatgctaacacttctctcccactactgtatgtaggcaaaatttccttctcccctgaactactaacatcagtacagataagagccgaaatatcaccagtgataaacacttgatttgatgtgcaaatatctgctttttttttctcccaaacctactaagatggtggtctgtctgcagcatctacttgcactcttctgcatggagattagcttttgttattcaaattcgtattgacactaaataaaattttaattaaattttttctttaagtttttaattaagaatttcatgcatgaatactgtatttacatcatttctatcttctttttcctccttccaataggcctccttccaacttccccagtccccccattccctctcaaattattgagttctttaattacacacacacacacacacacacacacacacacacacacacacacacagaaaacaaaacaaacaaacaaaacccccaaacctgctgctgccatgtagtgtttctcttacatatatatgtttaggcctcaccacttaggacaggataacctatcagggagcttcttcctagagaagaagactaattctttatttctgtagccattaatggcctataattcttcatctagggctaagccttattagacttcccttatctgcactagcatgactttggtgttgtaattatgggggtcttatttaggtaaccatattgttaagatgtcatagatgcaacttccctgtcatttatagaagacactatcttttagcacacatcctggtcctttggctcttatcaaatctttctttcccctcttcatcaatgttcccttagccttaggtatagcgattatattacagatgtatcaagtggggttgggcaccccactgtcagttgtcctctgcatttcaaccagttgtagatttctataattgtctgtctgctgcaaagagaatcttctttgatgagagttgagaactcaacttacccacgtgtgtaagtataagtatttaaaatgcagttgggcattatagttgttcaggaaagtggcagtagcagactcttctccacattccgtggccttccccactagtcatctatattacagtacaaggtatgaattccttcctgacagggcttgaaaccaaattagaaggctgctagttatcctcaagatgaaatgctgctattgaacacttggggatatcctgctgtgatggtcatcgatgtggttcacgggctttacagctgggtagaataattgattgcttttcacctttggcaattttatagcaacttctgatacttgggggctagtcctcaagaaagaggcttctggtcagttccagcttgacttttccaaatccttctgaagtatgtggcatctgcaagagtagggacttaccttcaagatctgggaagaaaccaaagacgatggcaataaccagtattgttttgtgtgttgtgtattggacttcctggccaacaatccaaagtggggatttccatgcctggcactgtagggggtttggtccctacaaaaaccccagtgccaggtctatagctctttcagaagtgttatcattccaagtgccataatttcctatagtacacacacacacacacacacacacacacacacacacacacacttaaatattatatatgtatttttttcagatttttaacatttgaattagaaacaagattgttttacatgacaatcccagttcccttctccctcccatctgcccctacgacccccccccaactaaaaccctacctatcacataccctttcttctattcttcccctgactcaacctttctgctccctcatgacttctgcatccttcctcttcttcccttctcattctggtagctccctcccccctcttcccatgctttcaatttgcttaggggatcttgaccctttccccttctccaggggaccatgtatgtctctcttagggtcctccttgtttacaagcatctctggcagtgtggattataggctgtcaatcctttacactatgtctaaaatccacatatgagtgagtacatatcatgcttgtcttttgtgactgggttatctcgctcagaatggtttcttctagttccacccaattttctgcaaatttcaagattccattgttttttctgctgagtagtactccattgtgtaaatgtaccacattttctctatccattcttcagttgaggagcatctaggctgcttccaggttctggctattacaaatagtgctgctacaaatattgttgaacaaatgttcttgttgtatgaatgtgcttcttttgggtatatgcctaagagtggaattgctgcatcttgtggtagactgattcccattttcttgaggagtcgtcatactgatttccaaagtgtctgtacaagttggcactcccaacagcagtggagaagtgttcccctttctccacatcctctccagcataaactgtcattggtgttttttattttggccattcagacaggagtaagatggtatctcagagttgttttgatttgcatttccctgatggctaaggatgttgaacactttcttatgtgtctttcagccattttagattcctctattgagaattgtctatttagttctgtaccccactttttaattggattgtttggtgttttggagactagcttcttgagttctttgtatattttggagatcagccctctgtcagatgtggggttggtgagtatcttttcccagtctgtgggctgcccgttttgtcttcccgactgtgtcctttgccttacagaagcttctcagtttcaggaggtcccatttatcaattgttgatctcagtgtctgtgctactggtataatgttcaggaagtggtctcctgtaccaattaattcaagggtatttcccactttgtcttctagtagggttagtgtggctgggtttatgttgaggtctttgatccattttgacttaagttttgtgcagggcaaaaggcttgggtctatctgtagtcttctacatgtcagcatccagttatgccagcatcatttgttgaagatgttctctttgttccagtatataaatttggattgtttgtcaaaaatcaggttttgtaggtgtgtgggttaatatcagggtttcaactctattccattgatctacctgtctatttttgtgccaatatcaagctgtttgcaggactatagctgtgtaacagagcttgaagtcaaggatggtgatgcctccagaagttcctttattgtacaggttgttttggctatcctgggtcttttgtttctccatatatatgtaattttaagtaaacataaaataaggtttatattgtgggaaattaccaatacagagccaagtggaaatataagggtatttaatagggaaaaaccttacttacagagcaacctagccagccggcgtggcagcagtctgtccagcaagtacaaaagtgaaaccgaaagagaaaacgcagtcccatgcaagtatcactcgacgacaccctgaccacgccctcacaagcgtggtcaggcacacctgtagccagctccttagtaggcgtggctacagcttcccctacaggtttacctatggctttttcaaacacctttactgtaatttgtcctttcttcttccctgttactctgtagtgccctctttccccctcatcagttaaagactccaatactccatcatttacccattgatagcacttagatcatactgtcacccactctagagctccttcccctcctggcccccacactacctgtttatttttctgatttctgtggctattctaccttacatactcacactaaagattcagaactcggatctacaaggaagtgagaacaagaggtatttgtctttctggctctcagttacttcactcattatactatgttttctttccatccatttacttttcaatttcatgatttcatttttctttatagatggagagtattccattgtgttttgtacacattttcatttctattcatcagttgaaggacatttaggttgttttcattcctaagctgttgtgaatagagtggcaataaacatgtttaagcatatatcagtagagtgggatattgtatttggagatatgacacgtgtgattaagtaagaattgctccataggctcatagatttgaacactttgtcatcagggagtgattaggtgtggctttgttgaagcaagtgtgtcactggggggcgtgttttgggatttaaaaatctcaaccaggcccagtctctctctctctctctctctctctctctctctctctctctctctctctctctcactatagatcagaatgtagaactctcagctactctacagcaccatgccctgccacaatgacaacagtctaaacctctaaactgaacaagtccaattaaatgctttccattttaagagttgcctaactcatggtggttcttcacagcaatagagcattgcctaaatcatcaaggaatggtatggctgggttgtaccgtagatttagttttagtttttaaaggaatcaccagactactttccattgtggctacacaggtttgcattctgaccaacagtgaatgaaggttccccatttcccacatccttgccagaattggttgacaattgtttccttgatcttggtcattctaacttgggtaagataaaatcttaaagaagtttaatttatatttctccaattgctaatatgttgaacaattttaaaaatagctcttactcatttttttttttttcgtttgagaattctctgctcaaatttgtagcccagccgttgattgggtcatttgttttcttgattatttgttatttgagttctttgtgtattctcaacattaatcttcctagaacattattggaatttttcttttttcttttttttcaagacagaggttctatgtgtagccctggctgtattgaaactcactctgtagaacaggctggcctcaaactcagagatctcgctgcttctgcatcctgagttctgggattaaaggcatgtattggccatcattgagattttgatggggaatgtgttgaatctatacaccagtgttgtctggtactattcttggggagatgtgaataaaagtctgccaaagtatgggtaccaccgatgtccaacttgaggaactgtattgaggttactgacaagaatatgggtgaaggattatgtataagaatagaagccaaagacagttacatcatcaaaagtccatcccagtatgagtaacagctcatggaagctggaaacctagagtacagtaaacaaacaaccttcaggcaactctatctgtttgagagtgtccttcacaggaagctcagttggtttgagcttccttccaggcagtgcagctggtctctgactttggcagagagcttggatgattgtaatgataaatctttccgttgcagccacccgagccctagtgccatgggtgaagatgaaaaattacctgggcaccgatgcggcggaggaataaatcccacccaagtccacaaccatcctaggtttccgaataaaaatcccatattctgacaccaaataaagtggggtgcaattaatgcataccgcaaaggagtcagagcaagtttgacaaacagatgttttaataggaaagtactcacgcagtcagtcctctaaatcaggcgaaccatggaattgagacagccacctgtgtgcgaccctcatattgaaggtcttgctaagtcactgaccacgccctagtgtgagtggtatgcgtcacctgtgccagcccccaagagggtgtggctaacatttttcctacagatgatctctgtcttttccaggtggctcagctggtgtaagcctcttttagtaactcagcttgtttgagagtcactatcagcagtccttgatgtttatacatgcttgaagagggagaggccgcatgaatctggtctgtttcagggacttcctgaagctatttcctgaacttaaccagcctccctgcatgatggaatgtttcatcttccctgagagcattctcttgttttacttcacttttaacattgtcttttaaaaaattcacttattctttattttatgtgtgtgagtgttttgtttacatatatgcatgtgtatcacatgcatacattacctttggaggcctgaagatggcatcagatcccctgggacctggagttacagacagctgcaagccactgtgtaggtgatgggaattgaaccagtatcctctggaagatcagcctgtccttttaactgctgaacaatgtgatcagctctataacatcctatctttgcttatgtgagggcttatctggattgggttaagtggaaagactcaccttaaatgtgggtagtattgtcatggtctgggatcccaggctgaataaaaaggagaaagtgaactgagcacacacattcatcactctgcttccagactggggatgtagtttgaccagctgtctgtatctgtgacttgcccaccatcatgggcggtcctctcacactgtaagccaaaacaaacccttccagctccaacttgcttttgttgaggtattctatcacatcaacacaaacagtaacaaatacaaaaacaaaacagaactggtactgagaagtggggctggtggtgtgataaaccttacttactatgtggacttaggcatgtggagcctctttgtgagaatgatgtagtagaacactgaacttcggggctacaaaaggcttagcagataacactgctgggagaaatatggactgtggaggcctagctcagaaggcttcatagagaaacaaggattctatcaggatctgagctagagaccaccccatggggtattctgaccaagaaccaagctacattctgtctccatcctgagaactctggattttctttgagcctgtttcaataactgccattgataatcttttccattgtctatttatttgcttgattcttccatttgtggggtctttttcagagttcaattttcttgttaaaatttctttgtgttttaatttttccctctaaatgttgactaatcatcctcttttctagctttgttgtccagatcctgaactgatttccttatttccttcatctacttgttttgaatcttttcatgtggttatcaattcttttaaagaggactctggaatcttttttatagcatttcagatatctcatttggtttctggtcttgaggagctctgagctcattggggtaacatagtagattattgtctcatatttttgcttttctctgttatgttttatgcatttactgggtcagatatgtcctctaatcctcaccccagccccctttccccattctctttgtttgtttgattttatgttagtcttcaccaagatttatattctctactgctttttagaggggaaaatgactgctgtaacaggtctaaggttttaatagcattcttggtgttaacctaaaatagaaggctctgtgtgtatcgtgtgtgtccctgataaggctcagagatactgctagggtataggatgggggacacatagttttcacttttattttctttgttagacctaaaggtatcaatatttaagggatgagaaaagagggagcaaggcatgaatgagaaggaaagtacatgggttagatgagtcaacgggtagtagaatattgtggagagatgagagaaagaaagaacatacataaaagctgacatcaatgagatgagatacaagttaaaacacaaccaacaattaaaataaaaagttgtacatgattttaaaaaaatcaatgaaatgaaaaagaaggcattatgacctcaatcagcagttaaacctcattaacattttgagtgttctccttacccttggattgtctttttcacaagtggagaggtggacctccagtctgagtagttcaaacaagttaaatcagtgtgtccattttctgccagcgtccccctgaggctgagggggtgtggaaggctcgcgtgattgtatttgtcttctctgaaaccatatcgatagtgtcctaagttctgcagcacatgtggtgcaaatctgtgtggcttgcccaggttaagtcaaaggtgagggctgaggtgattacaccctggtgttaactcctgcctcctgtgctgctatatttctttggcctccacagccttctctgctggggccttttctccatgcatgccatctctagccccttgctgtatttctacagcattgaccctctctgtatggatatcttggtgcctaccactgagacaacttctttgatagttacagttgattcaagccagtatgagtaagcatggcatgactaggtattggtaggagtcccacctagcctttcctttagatatttcgcttacatgaatatagtctattatttttatcctattctttctatttgactgcaccaatgtggcttctaatctaccacctaacccagaagtccagaagatgttttcttttaggaaattgtgataatatctttgctttactttgactttgatttttaaaaagttactgttggatttaagcaggtctgtagctacttcatacaaggttcatgttatgagtaacattacactggttttgagcccagccttctgggaggactacaaacttccatcctggtatcttgtaattctaagccattgaattaaaaagtacaaatatcttgaagagtagacaatgtgtagaggtctcaagaaagaaggcacatagatagatcccagtcagtcaagttcagtcatcaagtctacttttgtttagatagcaacttcattaatgacattctcctggtctgtcaaatcaatccatgttttcagtgctgtctcactgataattctagctgatatcttaccaacaaaaattttgtcaactgagatcttgaatctatctaccaaaagccatgagatcaagtaatgacatttattttaagattttctcttttggaatagcttattactttataatatgagatgaacagaatagctgacaatactatttcgatggtaaacattacttgtttatggaactgatcaaactgaaagctgatatcgacattattctaggtatgcaggaaacagctgctgcattgaaactatgtgactcttagtttaaaaactgcacaagaaaaaaaaacccataaaactgaaatgacaaaagataaaaaaatattagtgaaggattcaagagaaagttaattgtttcctctgcaaagaaattttgtgtggcatggtttaaaacctcaacgtgaaattttctgtaaattctgattaattggctcatctgtggattctgtagttcagaaaagcagaacagtttactctcagatggaaggatggaaatcttagtgtgcaaactgtcgcaaagatgtgctcatcaaatgtgacattgattgattgattgattcaccaactccaattgactcatttctccaatttcagttgacaatttgctgctactaaatgatatactagttcttgggagaagagggtgaggataaacatggaatgatcccacaacgtaggaaattgtataaacatacaaacataaatattctaagaacagttattacaactcatacagttagctttgtctctgaaaaggtggcacctaacatcctacattctcttatctctcagtcttatacccttgactgataattaaatcagcttcatttcctgaacagggctttcttaaagtctgtcaatttagcaggtcttattacctcctaataggtgttctgtgatttaaagaaatgaattacaagcttcaggccatttctgagagagccaacagccaagctttaacaaactgctgcaagaacttcaatggggggaaagagtgaagggagctttgtctccaatagaacgtttggcacattgtggttcagatgtatttggaagccgcaagttcactgctttttcagtcataaaagcacaaataaagaaagtcttctgattcctcggcattctgattagtctgtactgttagttagctttcatttcctgtgacagaatagatatggtaaacggtttaaaaagagggggaatttgtttgtattcataatttcaaaggtcttagttatgtttgcttggcttggttagtttgggcttgtggtgtggcagagcaccatggcacagacggagtgagtgagtggagcaacacaatggagccagaggcaaagaaggagcaagggtccttcttcttcttcttcttcttcttcttcttcttcttcttcttcttcttcttcttcttcttcttcttcttctttttttttctttgccctcccaaactttgttaagagattgctgttgagagtagatttctaagatgaggtacggatacagtagagaaaagcacacagtatctccccaggcaggatgagccaagcacacttcaaaccataacagccctatgggtttcttgtccttcccattgctgagacacgaactaggataaaggagattttgttatagtagatagctattacttgtttccatcaggattctgtgaacctgtgaccttcctatgtgctttctgcatgtgcatttccctgagctcagagaaatattggcatgaatctgtcttcttaggcacattgacatcattcttgttctctcccctgttggtaactgtagcaactcaactattatcccatggtttctttcttccattttctctatgattaccaacaagaattcaaagatttcaaagaatcagccagatgtgtgcagggttgtatcaatgctccactagtgccattgctggaggctcagctgtcgtaaatcagcttgcttgtatctcttgttttaaacataggaatctgattccagctagctgggttttgctagattgtagaaaaatgccctcagaaggactgcagggaacaggaaatttatatattggctgaactttttaagtagcagtccacaggggtaatttacattaaagaaaacccagcatgaggctgctgtgggatttacaggcacttttgttagaaatgaaaatatcatacttctaaccaaaatggattgaatggttcaatgcacacagagttcttttcatctgtaaacagtttgaaaaatccagcaagtaagaaatgaaacactgatttagtgtaaaattgaaacctctcagataaatttaatactcttctaggtatcaaaggtttttgtgttcacaatacaagctgtggtctacagtcccaggaacacactgtcttccagacatggctagttgaaatgcctatgcttatgaagtttgccattcagtggaaatgggcaaagagtatttggcatgcagctactcaggatcagagcacactttttaagaaagtcaacttggggatcacattgcaaagtgagccttgtaattcctggtacttgatcctcacagaactcccaatgtaggtgtgtctaaagacctctggggactaagactgggcaatgggaggaactgctagatgcagatacagatgtagatggcagaacacagcaggcattaggttggaaatggtactgtctagcagttagctataaaaacaactccttgtagcatgatagttacaatgacattactacaggggcctttgtaaatcatagagacttaatgacagaaattgtttaaaaatacctaattttcaacagtcttttattaaattttaatttctcttaatgcctctcttcccagttagaaatctaaattttatagacttagcttaagttttgacttaagtttttttttaatttcctaaaacctttgtaaatattcatatatacatacaaggtatgcatgtctctgtgttaatgtgttaccatgggattttagtaatacatatttttaatttaagcaaaaatgagatttgtaaataacaagttataaactactaggtgagccaattttcatgaaccctctttgttcggtagctgcctctcctggataagttgccctttttccaacccacagccatctgcaaatccacaagcctacttttggaccatgacctacaaaccttagtttcctagacacccttgtagggtaagtaagtcacttcctcattttttcatcttcacattcgcatcccctcattgtgccccaactcctatgcctgtatttatgtccacaccccaaaagcatagctccagactggttgtctttggaccagctttcttcaggaatcacttttgactagtgagatggttcttttttctcccatcctcctctctgccagctgctatctctacactcccaggtcctagctccaggccaagggtttgggagccatctttccctagtctaattaaacagttcattaagcagctttctagctcatgtcatacacctcctgtactgacccaatctgagaaagtccagattatcaaatcagactcacaactgaagaaagaagaccacatgttcaggtcaaatcacaaaaaaaaaaaaacaaaaaaacaaaaaaaaaaaaaaaacaaaaacctatgtgaaggtccaacacagcatgtctctcataaaacccactagttctacataaaattttatctaataagaacaaagtagatgaataccagagcacagaatttaaaagaacaatcataaatcttatcaaagaatgaaaggaatttaaagaaaatatgaatgaacaattcattaaacttaaagaggataacaataaatattcgagtgatgttcaagaaaatgtaaatgtatcgttaaatgaaatgacaaagataattcagaatttgaaaactgagttcagtaaagagatagaaacattgaagatagaaacccaagctgaacttaagatagaattgaaaaaaaaccttcagtaacctggctagatgacaagtagaacaaactggcagaagatagaacatcaacaatgaaagattaagtaaaggatctagacaaaataatcaaagaacatgaaaatatgtaaaaagaacaggaaaggaatataccaatggaattgaagacacagactaacacaaatccaatcattatagatgatttcaacatctcaatactcctctggaagatctggacaaagaataaacagaaaagctccagaaataaatgtcatcttacaacaaatcgacctaacagttttctacagataattccatccaagtaccattctattcagcatgatatggaagctcttataaaagctgggccacaaaacaaaccatcgcaaatccaggaaaatggaaatgattccatgttctgttagaccattattcaataaaacttaaggctgacagcaaaaaaactccagtaagcatataaacccagggaggttaaacaactcataattgaatgatgaaggttcaaaggaaatatcaagaaagaaatgaaaatattcctggaatgaaatgagatgacatgaaaatgaaaatgaaacaaaacctctgggacacattaaaagcagttctaagagggaagtttatagccttaagtacctacattaaaagatcagaaagagaacaaataaatggtttaatgatgaaactcaagaatttgggaaaacaagaacaaaccaaacccaagcccagtatacagcaagaataataaaaatcaaaggacaaattaatgaaatacaaacaaagaaagcattacaaagaatcaataaatctgagagcttgtctttgagaggataaacaagattgacagatccttggcccaactgaccaaaagaaagaatgagaggacccaaatgaacagaatcaggaatggataaggaaacattacaacagacaccaaaaattaagaatattaaaaggcaatactttaaaaacctgtactccattaagttggaaaatgtagaagaagtagaatttcttttttttctgattatagacatttattgaactcatttattgatttgacacacttccccactccaatctagcacatgatacaatctgggtaggctaggcactgacacaggaaatgatgggaacccacagcaggggtgggggaggggacaatgcaaagggcactgcgggaggggctgcttgggggctggggtggaggagccccagatggcctctctggcaggtgctagtaaacctgatccacattccccccatccctgctcatttcccagaccctcagccaaactctccaagctcccccttccctgttcctctccacagccctgcctgtcaccacacagtctcccacataaccctggcagtccaggactggaaagaagggcagggagagctgtcacaaaccttgaacagggaggtctctgtacctaactttactaccctaaatccttccttctttaagcccctcccaggccccaagccaattccaggccttggatgctctctggtagccctttctgtattcatccaaactgtcaaagttgaactaagaagagacaacttaaacatgcccataacaaaataggaaattaaaacagtaattaaaatccttccaactaaaataagttcagatatggataaattcaaagcagaattctacctgactttcaaaaaaggttctagaaccaacacttcttaaactcttgaaaaataaaatggcaaaagacagcatctttgataaaaggtgctgggaaaactggatgttaacattcagagaataaaattagacctgtgtccattacccttcataaaaattaggtcaaaatggatcaaatacctcaatttgaaaccaaaaacactaaaaccactacaagaaatataggcagtttcctacaagatataggaaaggactttgaacaggattcaatttacccaggaattaaaaccaaaaattgacaactgggtcctcataaaactaaaatgtttacatacagttatggaaacaatcaacttagtgaagaacaaacccacagaatagaagagaatctttgccagctactcatctgacaaaggattattgaaaatataaaacgaactcaaaaaacaaagttgagaaaacaaatgacccaatttaaaaaattgggctagacacttaaacagagagttcttaatggaagaaataaaattgttaagaaatacctcaaagtgttcatcatcatcagaaattagggaattgcaaactaaaccaatttgagatttcatcttcccctaatcagaatggctaagatcaacataacaaatggtggaattgtggggaaaggagaaccctcattcactgttctgggggacacaaattggtgaagccacttttgaaatcagcatggagaatattcaaaagactaaaataactagactaaattgaatagactagagtaaataaactagactaaaataaccaagactaaaataaacaacccatatgatccagatatatcattgcttggcatatgcacaaagggttagccattatactctagagatacttgctaacccatgttcattgatggcctgttaacaatagctaggaaatggaaacaatctaaatgtccttcaaaagatgagtagctaatgagaatgctgtatgtgtataccattgaatgctattcagctgtaaaggaaaatgaaatcgtaaaatgtgcaggtaagtgcatggagctagaaaagactatattgagtgaggtagcccagacccataaagacaaacaatgaatattctctctcatctattgttcttagatccaaattctcagatgtgactttccaacatggagtagccacagatagggcctgggtagggactcgcaagaaataggtgataggaagtaggaaactgaaaatggggaaggggcttcagcaagggtggaggaagggaagtcaatgaggtaggacagatcagatacaaataacaaaaaggctgctgataaagcatcagtgttttatacttaccaaaagttatacacaatatatatatgtataaacatatgtatacacatgcatatatatatttgctattaggctggcaatactccacacaggaatatagactaacaatctagtaccaggcacagatgtctccttttgaattgttgatcagggtagtgcaagtgactcccaaaagaatatgaactattggaccacagccaaaagtgcagagagacactgggccactggtcaggcatggctagaggcaagcaagtatgttgtggagagatgggagagaaagagaagtttagccgtttgtgtgctatgaagagaggcagaactgaagacttgaaggtggtgaggaacagcctgatatgagagacctgtgcagtcacctaaggccaggtgacacctgggctgtgttgcctcagaggccatgtctgggcccatggccctattgcaggatggggtctgtgttggttctcctggcccatgttaccaccaaaggctatgtggatgcttgtagtctgtactacaacctgaagccgtgtagctgtctgtgggccacactgccccttaccagccagcactggtgttacaaatggtgatattttctttttggagggtagatatggagggactgggaaatgagtggaattggggtgtgtgatgtgaaattctcaaagattcaacaattatgtttttaaaaataatattggtggcgcacgcctttaatcccagcactcaagaggcagaggcaggcggatctctgtgagttcgaggccagcctggtctccagagcgagtgccaggatagacagagaaaccctgtctcaaaaaaccaaaataataataataataataataataataataataataataatatagactattgatgtagcccttgtttgcctctcacaggttgaaggtaagcctgtattgttgaaggcactacacacacaggacacaggactctgataattcaagctggatctgacctgaaagtctcctgcctaaggtctagcttccgtggtttcagaaaacactatggaagatgccaggggaggaagcaattaatagttctatcagttgtgatccatctgaatcataacaatgatcagcatggcaagatatccataaaggtgcaatatgtggtatttagaggttcatgataaccaacagcagtacaaactcaaaggagggaagttgtgcctagtatcagaaacttggccaatttccaggatctagtgagttcattaaccttgtaaaagaatctcctaccaccactgtggtagagcagcataatttcttactacattctaaatcttatcctggtaagtgtagctacctcccatcctacaggaagcttctctttacagcaaatggagaccatcacagaaaaacacaactggatgtgatgtagagatcaatggatcatggcaagcccagccccaaggatacatctacaccttcatccatgtggctcaggaaacatagaagaggggggtggaaagattgtaaaagccagagtaccaggaagtctgcagtgaaacagtctctcctagatatggctgcataaataatatcagaacactagcaatataaataggcatgctggcatggaagggggggatttcctggagtcccacccttagacaaatagctacagtgagagagagggagagggagaattggctttgcccaagaatgagccacctaagtggctatgcagtacaaagtggtcagccctgaaaatatatgcacaaacaacaaactgaactcagtaggttatattttagttgttacacacatacatatataaatgtaattaacaataaaaagaaaaggatgttatcaatttgacagtgggtggcatggggaagggctgggggaaagaaaagaaatttggaaagtgatataattgtatattaattaaactgtattaaaataaaccttaaaataagctcaccaatacataaataaattaatttcttggtgatgacctgacttggcaccaccagaaaggcttatagacttactaaagccattctgtaaagaacctggtgattatctgtgttgtccttgcacataattatcagatgaaaaaaatgaggcctgagaaaatgaatagatgagattcagtgcatgaatggaatcagtctcaatggaggctaatctttactgggaacaaagaaaaatcctctggagccaggattagtggaaacattgttgaactttgatcgttttcctcctcttcttccatgatcacctctttctttttttgaaatgaattcttcaaatgcaagccaggctggtttcaaactcgagatcctcctgcctcagcttcctaagtgttggcctcacaaggatgtgccactatgccctgcttcagtcacattctccttgaagtgaaaatttccataaagtttataaaccataacctgagatgatgccttcttctgtccagttcctgtctctagaaaagtaaaaactttaacagttattcagatccccagtgttattttgaaggtgactcatttggaggtacaagctctaacacatgtgcttctcttctgttagctttaattatggaggctgtttgaggttcatcttgttggctagagtgggctcaggcctttacacgtgtgatccaccatcactgagttctgcaacatggcatttgtgcagtagctataaatttctttctttgaaacattaaggaaaccaaacatcatactctttgataaattaaaattatttaaataatactcttaagacactctgctagaaatttaaagaaaactttgatttttttgtaatagccagcattaagtagttcaggaaacatacaatagcttaccagttcctcatcttttaagtaagcagcatccctacttccatctaaaaaaaagtaaaaaccagttctgtgtgtctttcatagtataaatcattgtattttgccaccaactcagctaatttaatactttaaccaagcagagatagctaattgtttatcccaaatctattttctcttctcccagctgggggaagcaatataattggagaatgtcatcagtggctccagtgattcagcctttatcctatccttaccagctgcatggggcacagtcatggcacctggagttcctagtcctaatccaagcacgaggaactttaaagacagaccccagaactaaaggctaatgggcagaaaatgaggcaacatggatcttggtgaaaactctctttatttgagaggaaaataaatctatacagctgtcaaccattcctatgccacacttccctttctgtgtaatagtacataaaagaaatttttgtacttaattcaccatactacacaaaataagcccagttcagactaataacaagtttctgcttattgtgaggcctagaatttataatagatacatacatggaggcagaagggagaggatagagactgcccgtaaggggttgggggcaggaaagagagagggagggggcctcaaagggacaaaaatcaaatgaaatactcaaaagaaatcaccttcatgaaacccagcattagaagagtgaatgaatctcaataaatacacaagtaaatgaatctattatgccatgatatgtcaagtaaggcatacttttttttttttaatggtgaatgaagtggaaatgaggagtgcttaaatgaaaatgtgtaagaagtaggaaaaagcttcatcgagactcaatggcacaaaagaacacatgagaaaatcctgctgcttagctggtttgggctgaatcaagaaacaggtcctagactccatcacccaccttcttcagggacagaacccaaagtgatacaaactttccagaaattgtagaaaaaaaatctagggaagagttgcccttcctcgagagtactgagaaaacatttatagaaatcaataattatttttttaaaaattcaactgtaaaactgacaacatggcatgtcatcaagcgtgccctcttacccatttttaaagtacatagttcagtggtataagacacattcatgccattgtgcaagtctctagagagtctcaccttgcacaattgatatgatggccaccagttggcgaagtgtccttctccctttcccagcctgggccattgtcatttttttctgtcaattccctttcttatttgagtggaatgatacactttttgtctttttgtgactgtattacttaacttagcatgactttctcaatattatcttgttttactatgtaatatgagtttcttctttttaaaacctggtataatatctgattatatgtatataccaaaatgtatttattcattcatctattcatgagaaaatgtaggtgttttaacctttggctgttgtgcgtggtgttctacgcatatggctacaaggtctccctgagattctgctttcagtagatatatttccacaagtgggattgttggattgtatggttaatcccactttgagatatttcgaggaagctccatgccatttccacagcagctgtactattttacattctcatcaacagtggccagagactttcttttctccacatcttctctaacagttaataatttttttgtctttgttttttttttttcttctccaaaatgttgttagttacttaggatgcttcaagattccaccaaaatattagagttcttgaaaatacttccaccaaaaagttgctaatgggatttccatagggattaagctgaatttacacacacccctaggtagctggagacggtgttagctcaaatgtgagaagatgtatgatcagttcagtggagaatcagatcctccttggatgtgctatatgaataagtaaggcaggtatggtagtttaaatgtaactgactcctgtaagctcataaggagtggcactatcaggaggtgtggctttgttggagtaggtatggccttgttggaggaagtgtgtcactgtggaggtgggctttgaggtttcctatgctcaagctacacccagtgacacagtttatttcttgttgcctttggatcatgtagaattctcagccccttttccagcaccatgtctgccttcatttgaccatgttccagcacgatgataatgcaatgaacctttgacccgtaagccaaccattaaatattttcctttataattgttactgtggttctggtgtgtccccacagcaatagaaaccctaggacagcaggtgattgtgctgagtgtgccttgtttggtgacttgtagtagatgaaactacaaggacaaggaagtgtagcgctatcttttgtaaagaaaccacaagctaagaggggtgactgttcatgtggcaaagaagacagggcccggagcctggtaaagaaaggaaaattttgtgcattctttaaatcatgaatttagtagctgtaattccttggtagaagtgaaggaggaatcatattaagttgcatgagaacaataaataaataaataaataaataaataaataaataaataagctgattagcacttagtagtgtcttcaagagtaacttggtgtggaggaattgttaaggagtcacaaatgcagaatttatatgtcaactcagttatagatggctgttctagctggggttttttttttttttaagtttccttttctttcacaatcttgtctcacttgtcaaatggaagtgagcttatgctgtatcttttaatctgagtgagtccaaacacacgggtgtgctctaagagaacacattataaaactcctgcagaaaggtcacccactctagttagcagtaatctcttcctggtgttccttagtatctaaagaggaaactgttttagcccattctgactctctctctctctctctctctctctctctctctctctctctctctctctctctctcttcctgtgtacatgcatgcatggcatacacacatatctgcaatccatttattcagttcatttatatatgaaaccacaaaattccttgttcagtctttttcaagagattttaagactcacaactacaaagtaaaagatgcctcatgatctaaactctcaaatactttctattcctttctttgtgggagaaactggtataccagtttgcctttctttacaatggaagggaagaaattttggtggttattttttctccaattgaggaagttttgcaatgattccaagtaattataacaatcaaacaggaaaaaaagctgacatttgttgacgttttgatcagttgtgttctcagattttgttttgttatttatctatgtgtatatgtgtgactctgtgagtgtagaggcgcctgcaagcacacacacacacacacacacacacacacacacacacacacacacacacacacaccccttaggctaggtaaaactgactgccgccatgccggatgacctgagttcaatccaatacttgcatggtggaagataagggctacaagacagcttccacacgctgtcttctgacctccccatgtttaccttggcatatgctacatcccctcatacaaaataaaaatgcaaaaatcgaataaaaagttagaaatgaaattaaaatatatttccagtttcccctttaggtttaatttcaaacacaaatgaaatttgcaagaatagtacaaagaacactttaaaatcctgctataatttttcccctctcattatctcatatttttttcttgagccatttgaaggtagactatgtacattattgttttaattttcaatatttcttcattgaatttctcctagagacaagagtattgtcttacacaaccacagttctcctgtttaggaactttgacaggaatgtatggtggaggtataatttcagtctagattcctgtttctgtcactcatcccctgtctttcgtggttcttctctgatcctttacaacaagctatcatttcttcttcctggctcggctttgtcttccatgactctgacatccttttgggatagagggtttttgtgcttatttgcttcgtgtgctaccacaggattagatctgagtatgtctcactggctagcaggctgtacaaaggtcctggagtggtgtgcagcatggccacctgttcctcatcagaaaagctgatgttggtcacccagtctcttagatttttggtgtgtttttttttttctttttatacccttggaacccataagcaatctctgtgaaaacattatagactaaaaatgtatggttttcatcaaattccaatttgaatagatttagcacgtactggagattcttgcctgaagctctaacactggtggggaatggagggatatttaacatgtgttccattcacattcataagctgaccttcctgtgctaccaaaatacttattatcagtatagacatagtttccctattttattgactgtgctataatctgtcgttatgcaattgtcctagatatagacaatgggagcctctgcaagatgaactcttatggttttgtttttctgaagtttattttttaaaaacattggattttagagttattttacagtaaaactacaaaacacaatcaattatttctgcatgccttgcacttattttgcccagctattaacatcttacatgactataacccacttgcagcaactgaaaagccagtattggcccttgctgttaattgcactttattttttgagtctcatgagcttcttgcatttccccttttgtggtccaggatcgtgctcagggcaacacattatatttaactgtcttggctccttagactattgggacaagtctcagacattcctcactttggagagtatggtcctgtgtccttttgacatgccggtatgtctattcactgacttattgaataccaccttgctttctggcacaagatgattcagaatccctttgttacatttcctctttaattctggaatttgtcatttctgcaagaagctcatgttccctttatagaaagtggtatttatgaagaggatatagttaagtagtaaagtccttgcctagcatgcacaaggccctgggttccgttctaagcatcataaacaaacagaacaatgaacaaaattttatttagattcttatatatggacactcaacagtgttgttgatactagccaaccaagtgtcactgattattagcatatcagatttagtaggtatatattacatattgatggagtcaccacacacacacacacacacacacacacacacacacacacacacacatatacattcagcccaaccctttgtctacctcccttcaacattacagtgtccttcagtcatgatcaccagtacttcttgtcattttctccattttataatactcataaattaatttaaaaatttctagatcaataacacatacacacactcacacacacacaccccaaagaaatgtggttctgtttacatgatcctcttttcttagtcagaaggtataccgccatacactaaattcaattgattctttaattagttctttcctccattcaatgtatttatattaatttttttaaaaaaaaccttaactctgtataattgatatcaattaatgttttactttacagaacatgggatggcttgtttacttgtaaaaactaaataatagatgctttggatttctatggaccacacaatctctgttgctgtgactgagctttagggtttggcatgaaagtacttatagattgtatgtaaataaatgagagtgactgagttataataagcctttacttataaaaataggtaatagactgcactatgtccatgaaccctacttcagagcactaaaatgtttcccaaatgctttggaaaagctatctttagaataatgttaccccttgttccacctcttttaccctgtgacttatggtattttccagagatgctcacgccttcagtctcacatgctgctttgcatggtacattgctgctccttcagcataaacgcttttaaatctaggttacccctgtgactttacaaaccaatacaatatttgaaagtggccatgaccatttgggtctttcatttcctgactcttaaaatgctcattctgagaggagcagctacattcaagccacaccttggggccttcatgctttgaagaagtccaaattacatgaagagtcaataacatctctagttatccacttactctccacgtgcctcgggatatcagacatgtgagtgcagaggccttcttgacacactcctcttgcagatgccaggcataatgcctaaagtgagttgtctggccttccggccattcagacaatcacagatgaggctgtaaatgcagtgtaggacagatgaatctttagccactgtgagaattcttggacttactatatgtaatattcttatatttccactaacttgtgtggagtgtggagtagagatgtctcacaaaatgtatttaaaaccttatttatttatttattagttcaaattaggaacaagcttgcttcacatgtcaatcccttctccctctccttccccttcccccaaccctcctccaacccctcctgcccccaccccatcaccctccactccccaggcagggtaggttcctcgatgggggctccccaaagtccaccacatcatcatgggctgggcctaggccctcccacatgtgtccaggctgagggtgcatcccttcatgtggatgggctctcaaagtcccttcttacaccagggaaaaatactgatagagaaaatgtggtacatttatacaatggagtactactcagcagaaaaaagcaatggaatcttgaaattcgcaggcaaatagatagaactaggagaaaccatcctgagtgaggtaacccagtcacaaaaagacaaacatggtatatactcactcatatatgaattttagatagagcaaaggattaccagcctacaatcctcttcaccaaagaaactaggaagcaagaagcactctaagagaaaaatgcatggaccccagagaatggaagagccaggatctcctgacctaactgggagcatgagggtggggagagggagctggcagaatgagaggaggagaagaggaggaaatggaggagcagaaaggttgagttgggggaagaatagaggagaccaggatgagagataccattacagagggagccattataggtcttaggagagatctggcactagggagatttccagagatctataagaatgacacgaactgacaatctgggataccctaaatgcccttcccctataatagactgatgactactttatatgccatcctagagccttcatccagtggctgatggaagcagaggcagacacccacagatatatactgaactgaactctggaacccagttgcagagagggaggaatgaagatcaaaggggtcagggctaggctggtgaaacccacagaatcagctggcctgaataagggggagcacatggatcccagactgatatctaggagtccagaacaggactgatccagacccctgaacatggatgtcaatgaggaggcctccgaactcgatggggcccctggtagtggatcagtatttaaaatctttaagaggtagaacctcataggagtttatgggtcatgtaggaatgtccttctaaagaaactgtggatccttggacttctcctgatcatatttttatctttttccatcaggtaaacaagctttctctgccacatggcttcagattctgcattgtagttaatttttaagacgttaccatttatttagtatagtgtctgagaagactatcaagaatcatctgacatggctactaaaacatccctctcttctcgagttacttatctattcatatgcataggtggaatatatgtgcttcatatattccaactatataaaatacaatattatgctaatcaatgaatgaggtagcacattacatttcaatacatgtataatgcatgtaatgttcaaatcatattaaatatatttagcttcttgatttcttcatggtataaatggttgatgaagtcaacttaccacagagacacttgcacaatcttgctcactgaatcaatattcacaataattaaattatggtacctgtgtaggtgcccaacaacagagaaatggataaagaaaatgtgacatataaatttgatagacttttcttctggccataatgaagcaatgttcttttcaggacaatttatacaactagtaataattatattaattatattaagtgaattgagtcagtttccgatagaaaatgctattttctctcatttgtggttcttagattcttatatagttacataaaatcatacacatacacatatacatatacatgcacatatatgacatgaaagtagaagttaaatagtctagagaaacaaaggagactaattggagggagagcgatgaaacggtgaggggaggaaggcataggaagactatgctccatgtgcaatatgtatttgtaggaaaaatcctcatgtaaaacagtaccaggaacaatgaatatacatgatgaaaaatttaatttgtatttggttttttaaaattatgtttatgtacatattttatgaaggctcttagtagttttccatataactgtttaaactatatatcaagctggtattcacctgggaattccatctctattattatgcatgctgtctaaggaggaaagtaatcaccaatattagtcagtttcatcttgagagctccatcagtgtctgggttgtcaagacatgcccgatggtgtaatagtgacatccacccttgtcatgttagttgagtcaatgctaaatattttaacccccgccccaggattgctaactgtcccgcgcacgctctgtatttctcgccagcaagaaatcatacgcaggacactcggatccttctgcagacaagctttaatgcatcttaccagagtggagactgagcagagacactaaaccaagaaaaccatccctatataaaggctgaccagccgcctgggacgtgttaccctaagaatggcttcagctcctcaggcaaaaatgagccacgggataggcagagatcaaaggaatggagattacccagcgcctgtgaagtaattcacatcttggtgtcttcaggcaccattataatgtaggaaccggcttcctacatatcccccttttttattaattaatgaaaaggctttatatatttttataagcaaataggtcacccaaatgttgagggatagaggtagaggctgaaccttcccaaaatcaaacattaagactgtgtacaagagtcgccctcaggctgttagcttcacctgaagcactcttgacctgtcctctgccgtttttctgggaaagggaagtcttggggcaggtaacccttatgcaggtcaacgtacctcccagagaagcctgcataataggcaactctgtgcgatgcctatgctcagcatccctctttgggctgctcagaccagacactctaccctgtgcaatgagcctaggctccgggtgtgcaagagctgtctggccggcggcctattgcttagccaaaatataagcgcttgggtgatctcttggtttgagccctggagcttacatgccagtcaaaagtaacagcaatccgcaagcggctgcatcaaacaattacacccccaccccttttctcacagaccagccaaaaataacagcaatccgcaaacggctgcatcaaacaataacacccccaccccttaagcagtgacaatctctccgccaagggcaggagttaatctggataacaatagcggctctcaattcccgggggtagagggtggagttccgacttttgaaggtctgtaggggctcttcgggtgagtctttctgggatccacagaggattttcttcatcctgtgagaaaacacaatatcgctcccctggatcttatgagaataggatccgggcttctccaaagatcagttaagatatcttttcattttaccatttccttttggttttttaggttttgaggtgagacgcttggcccgagcgtcaatgttaatgaggctttaaagccccaggcattccaggcctttaagaagtgttgaatagcaggcatggccttttcccctatcaaagactgggaaagccatctgtaattttctccgctcctctgatggtaagaaggagtcggttccaaatagtgggtgtgctgatagaagtacacccgctgaattaacaggcgatggcctcatatttgtttttacttttggcagctcctcctctagctctgcttccttgttagagtctaaaatctcagagtctgagctgctcagctccaaggcttccagtttcgttgcagggcagaggctaggttccgagtcctcatctctcctaaatttaccggggtgtgaccggccattccccattctttctccctccttctctgtctctccctcatccagctgagctgttccttttaaaactttatctcttgagcttttagagtcatcagagctatcaagatttaaagctttatacactcccttgtcagtagacattccaggaggtccttttttcttatttgttgctgtacacactcccttgtcagtagacattccgggaggtccttttttcttatattttattgttaggcgcgccccatctctcaccatattcggtttctgatatgtaattctggacttctttaagattgctgtaacagtgagaaaagtcaaaatagctcctagtaaaagcatagaagcctctatattaacctcccacaatagcaacattcccaagccaaagtccagaaaaatcatacctctccgaatttctctcattacattcggtttctgatatgtaattctggacttctttaagattgtcccaagccaaagtccagaaaaatcatacctctccgaatttaccatcctgcagttctgaatccgccctgtaaccaaggggtctccgcggtgccggagatgttaagcttcccgggtttcggcaccatatgtcccgcgcacgctctgtatttctcgccagcaagaaatcatacgcaggacactcggatccttctgcagacaagctttaatgcatcttaccagagtggagactgagcagagacactaaaccaagaaaaccatccctatataaaggctgaccagccgcctgggacgtgttaccctaagaatggcttcagctcctcaggcaaaatgagccacgggataggcagagatcaaaggaatggagattacccagcgcctgtgaagtaattcacatcttggtgtcttcaggcaccattataatgtaggaaccggcttcctacagctaaccttaggattaactgaatccatgtggcaaataagtcaagaaggtgtttttgaagcattatcagcagcaaaacctagaacatagtcaaaattagaaaaaaaacaaatcagaataatgcccaagaacgttcatcatttcaaccaaaatgcaaagaggtgtgaggacatagtttgtgatttagtgtctgaaagatactggtttaatttggatcttgatcatccccccaaaggcccatatattagtccctaggtaggtacagctggaagttgtacctaggaggaactgtatgggtcattgaggacataccctcatcgggaacagtaagcatccagtctcttccacttctttacttttacttgctggccatgaaggacatgaaggagatagttttaatccagtagggtgatgtaacctcataccacattcctctaaagcaatggggccaatgaactgtgggccaaagctttaaaagacaggagcttaaatatgctatatataagctgaacctattaggtatttatctatgtgcatgtgtacatgctcattgtgtgtgtgtgtgtgtgtgtgtgtgtgtgtgtgtgtgtgtacataccacatggagagtctagaaatagattcttaatcactcctcattttatttttttgatgtaagtgaccatagctcctcttataaagggaagcatttaattggttaattgcttacagtgtcagggtcttaatccattatcaatatggcaggagcatggttggcacaaaggcagacacaatgcttgagaagtagctgagagttctgcatctggatctgcaggcagtaggaagagagcaatgctgaccttggcttgggctttttgaaactttaaagtttcacacttaaagtgacacacttcctccaacagggccacacctactccaataaagccacacttctcaacccctcccaagtagtatcactccctggtgactaagatttcaaatatatgaacctgggggtaggcattcttactcaaagcagaacattccactccctgcacctcaggggcttctgtcatatcttaatgcaaaatagcatttaatccaacttcaaaatctctataatctatagcagtattaacaccatttaaagtccaaagtcttttctgagaatcatagcaacattttaaatgtagcccaggataaaaatcagaatcaaaaatcaaaaaaacagatgacatacttcttacacatgattgcagaatatacatcactatttaaaaagggagaaagggagcatagtggggaaatactgggccaaagcaagactagaaaccagccgagaaaattcctaacttttcacctccatgtccaatgtcaaagcactcttcagatctccaactccttttacctctgttgaccacaacacatttctctttcttggaatgcttcctttccctgttggcagcttttcttgtcaggtatccctcaactctggcatctccaacatcatggagtctccgacacaatccaggcttcaccttcacagtttcattcaatggcctctctgggctcccctacagggacatatctgacacacgcctgacctcagtggcttttcctaatcatgaagggagattctatcacccctttattgcatccttgactctaaagccagaaccacatgaccaaagctgccaagttctgctgcttgctcaggctagaacttggcatccttattcaaatacatgctcaccatctttctgttttctatggttgccttcactacttaaggatttctttatcttcctttcaacttggaaactcaactaggttgggtctttccctgcagttaccactccgtttattccatttagcagcaggcttttctttctttctttctttctttcttttttatctctttgagcacaggactttgcatcattaaactcggtgctccttttcttttcaagctctaagttttgtatttttttcttgctcaacttgccccttttcattatagatgtgtgtatgagtgtccactaataactacacaacacagtcaataccaaggctgttttgaaatctcctctgtcaatgccattgattaaaaactcttcattttagcctcaggcagatttttaggacaaggaaaaaaccatattctttgccaaaatatgccaagaatgatttttaggctctaactaatactcttcccttctgaaacttcttgagaggggctcctaaagtccacatcaccctcagcaccactgtcttccatgcttcgactaggatggcccattaaacccacttaaagcatttcagtactttcatcatccaaagttccaaagtccacattccaacaagcatcatggtccagcccatcacatcaacacccaactcttggtaaaactctgtcttagctggtattctactgctgtgaagagacaccataaccttgtcagttcttccaaaagaaaacatttaattgttcatttgcttacagtttcagacgtttagtctagtatcatggtaggtgaccatgccatccacacaggcagatatggtgctggagaagtatctgagggttctacatctgaatctatagccaacaggaagagagcaacattgagccttctttaagtgccatacttcccccagcaaagctatacttcccaacccctcccaagtagtgtcactccttgatgactaagtattcaaacatatgagtctaggggggtcatttacaccaccacagtaggtatctcactgaacttggaatttgggtaggcagattaaacatcatacccctgttattaaagtgtatatgcaagttatcactccgggctttgcttatgtctttttattttctttctttttaaactttacatagattctaggaattaaactgaggtctcaggcttccatggaaagcattttacagattacttcatctctctgttgataccttatgtatttgttagagtgatggaagctgataccaaacactaccaggttgtatatgaggatgaggttgcccatggaatgcaattagcaaggtgtataattctattgtatcttagatttagctaaaaccaaagagttcaagctctttcttctccatgttgcttaatacaaaggaaagattgagttcataaagttcacaaagaatgaaatgatcactttaaatttttatgacagctccatatttcaactcattggatactttttgatgtttaatatgatacttcatttcaaggtttccaattaataatatcatttaaatactaaatagacatgattatttagatgatcattatactcaaaagtcttacaatagttattatactaacaagttaatataatataataataatataatataattaagttaatggtaaccgtggccctaaaataacaataagataacaactaaatgtatgcttcccagtcaatccctaaaaacatgaaaagttgacaatggaaattttacagaaatttaaggtcaaaaggtaacaacaaatgcataataacaaatgcataacaacttctcatgtgcctaacacccctccaagcagtgggcatacactgaaagattttgaaaagaccattcagcaaaataattgatgttcagttttaaaattgacaaaatatagccaaattatccaataaagtaaggctctactcataagaagacagaagcccagagaacaaccataggttgtaaggccggacatgtccaggaatatttacagaatgccttctaaggaggaagtaagacagaaaggcaaacaactcaatattacataagcaatgctgtgtaagactacataacataactgaaggagtggatagtcccacatgggatggaggtgatgacttcagaggagcagtgacatttgaaaggacagggattaaatgggtttccttaggccattgagtttatatgaagacgttaaggaaatggaaacacttgagggtgttcctttgaaatagaaagaaatatttgaaaaccaatttcttctgcaacacatgtccaaattaaatggtgctttccattttctttaagacaaggtggtctgacaaattctttgtgtgagcaaaggcacccatgcaatgttgatagttcctgctaatcagctcatctacagcattctatagagttctactcccaccaatgaaactatgcacttacctaagtcagtttcactggtgcttaaattgtatgtgacagctgtcttatcaaaatatgtaatttgaaaaaaagcattgtacttagtaattagcactttatttaaatattgtgtaagtcaatgaaatgtgaaagaaatacttatgaatgtgtattggtgcatttgacttcagaaaaatccccaattttaaaatgttccccaaacttttattcattgctctatactcataattcaatattatattttgtaacttgcctggaggaagtataattaatgtgtgttagttactttcctattgcttggacaaaacatcgtgataaaggcaacttgtaaaagaaagcttatttcacctccataaccaaacatgggttgtgtaactatgaaaaattagtctgggaaagcacatgtatgtttttgttggtgaatgaaatgaatgactgagaaatctttggaattccaatgttgaggtctggcagctgcactaacctatgggtagaggtgtatgaatttaaagggaagtttgatagtgtgtccatttagcaaaataataatagttggttctcacctgggccctgtaaattcccaaactatggattcttgcccagattttcagttcatttcctcctgtggagcagttttaatccagccagaaattagttggtcactcccatagcattcatgtttctattgcatccctggacatcctcgccatgtcagccatcattatattttgtggagttcacatctgggtaggattgctgatcactatttcccctctccagcctgcataggtcaatactatcagagctagccagcaagcaggaagcctccccaccaacaatccttttctagtttcctacattctacagggagtctaaattaaacacacaaatataaagatttggtattaagatctgcatttgattaaaaatatgtgacatttgtctttctgggtctaagttacctcactcagtaggatgttctctatctatatccacttacctacaaatttcttaattttatttcttttacagttgaataaaattccattgtatatagacatcatattttcattatcttattcatcagcggatgtacctgaaggctgtttccttgtcttagctattgtgaatagagaaaacttcaccagagatttattgtgcagtggattgttgacacggaaactcacagctggtctaagtacaaagaataagtgactgtggaagaaggttcagccacaaaatgaaccatcaatattacatccccccgccttaaactcatgggccatcacagaagaggatgcaggaggactgtaagaaccagaggccagggaggaccatattgaaatagtctctttgagacatgacaagatggctgcattcatgaacttatagcagctgtgatggtctgcacaaaatcaagccagtcaacattctagcatagaatgagaggttcatgaaccttctcctctagctaagaagccacagatagcttctgggaggaaagagtcagttttcttaagagttgacctactcctaattggtcagccatgctctattggatgcactatacccagaagtatataagtagcacaaatttgagtcagtaagttacaaattaaacaaacaaacacacatgaagttagatagtgaaggaggtaggcatggatctgggaggagttaaggagaagaattggtgtaagtatgatcaagacacattacataaaattctcaaagaattaataaacatatttattaaagatctgaccgcctgagagcaggagaattgggtgtattgtgtgaactagctgaggcagtgctggagagctcgcctgggtagtgatgatgaggaaaagctggtgggctgaccaacacagctaccacccaggctcagaaccagggctgtgagcaggctcaacccaattccaccaaatctatgaactcttggagcatgtgatgggaacaaacttacaaatccaagatagaaggatctccatgacacaggacaacaacaggatatccaaggagccccagtgagagcccattaccatggtgtagcagaaacaagagatttagagctagaccaatgattcatggcaatgaatacttacaagtaaagatgaatggactaaagagtaaactgtgtgtctcaatgggccacatgacagctgatagcttctatgacaaaatccttctccttctccttctccttctcctccttctttttcttttggtttgttttggtcttggtttttcttttaaatcaaattttgttttggagggttgcaagggcagagggagagtaccagggggataagtggaatctaaatgcatgaagtgaaatctataaagaatccataaaagtaaagagaaaaaaataagacaaaaataaggaaaatacataaagttttatagaattaataaaatctatatattaaaaggataaatatatggaaatcatactttcttttgttgttactatattgtcaccttatgttttactccttttattaacaacttttggacagttgcctttgatttgtgaatgatgccactggagtatatgagctgatagcttccatgtatatctgctggcaccatgtatatctgcactgtgcagtctgagattctcaacctggtttacagatttggtgttactgtactgaaatctttcaaatcttctctttgaatttatattttgtgcattaagtcttttgtgacaagggagcatgcacatcaggaaaagagatacattacacaaaatgtgttttccataatgcctagcaatcacattcttgtagtttcagtgagacccatgaaaataaaactggtggaccctgactacctggaattaaatgaaaccaaaagtggatacaaagaaagctcatatatgcattaagagtaagaggggacaccgaaaaacctagaagtcatgttttgtgctccattgaatcagaactagtattgaattaacgaagccaatgacattttaagtaacaaaaaattctgctacagaactctattgtgatcagaatgatgacttcccactcacaaagactgtatcttattgcctagaaatttgtatatatattatgtatgtaatatgtatagttatacattatatagcatataggatgtattatttaggtatagtccctggcctctggttgttacagtcttcctgcctcctcttctgtgataaatatacatacattcacatacatatataacctaaaatatacataggcatatatatgtatatatatgtatttatatacatatatacatgttatagagaaaagttagagatttaacaagctaatgttgaggtgataatattaccctgggttatatgacattcatggtggaattgtaaaaaactttgtgggtgaaatgagaggagaaagaatgagaaagctggcagcatgagtaagaattggctaagtgtgaagggtcctccaagaattggaaaggaaaacaaacatcattccctagaaagcccagaagggagacagactccaaacacatcaatcttagactggaagacccatttgagacctctgacccttggaattgtaagaaagtaagcctgcattattttaaggcaataagtttgggttcctttcatacaatagtcataaaacacaaccgtaagtcctagcattgtttcttcctcagttaccttcctctattagctaatcacttatagtgacactgatgaaatgaaaataaaggtagaaaagcccaagtcctttcactgtacttcttcttcaccaccaaaagaggaggtgttcatagaacaagcacaccaagcagtaagatgaaagcagtagagtgtctggggtgtggcttagtagtggagcatgcccagaaccctagcttcaacccccagcattccacaacagtatacaacaacacaacagcagcagcagcatgcttctgctgttctgggtagaatggaggagagatgttacacacacggtgtagcttggaaattgtgtaacttagatgattctgtatgtagacaaatgttcttaggtttacattcaaacatggaattggcaattattaaaatggcaagttgggcatgttcattcacatttgtcattttagccctcagagagccgatgcatggggaatgctatacgattataattagtttcagagcagcatgggctacagggtgagaccccttcacaactacccatatggcatgtattcagcaaaaatcattctaagacttaaaatcatttacatagaataggaagtggaaaatcaaagaagctggagttgagtgttcacagaagaaaggaaagttcccacatagaatgtcactggtaggatggctccttgccttgtgaacaggatcttcaccatctgaatccgcactttgctctgcaatttatggagctgaccttgacccaggagtcagtcctaaaactcctgctactacaaaaatattttatgaaaactctaataaagaggaagacaatcccagaatcagacacaggtaagtttcatctttgtaactcagatatacccaacaggcatttttaccctactggaaatgcaccgtaccctacacacttccctcagttggcactgcaagtttgataggtttgtttccttatccttaattaattatccttaataactcccagtgtagcagcgcctatgaggaggactattcaaggaagactgacctcaggatcctcggagttccttatgcctaagaactctgagaagcctactaaatccatttctttctgcaaagcagttactcattttggggtatttcatttgggagtagatacaatattgctagctcatttactcaagcaaaaatatcctcttactccattagaagctttgtggcctcctaagacacctttggtgtaggcaactcatttgtatctctttctgaagtccctagagcccctgctatacacaggaatcaccccccctgcctgcccagcagtctgccttctgatcccatcgacagtctctcagagcatacatctggtttctctcctcaagtgaacgtggagagggacttaaacccatcttgatactggaaacccaaaactccagaaatcaaagggaaatgttagattttcaatccatttggagactctccttaggctattctgacagcagttagcacccaggtgactattctgtgacaatcagatatgctataaagcaatttaaggtagattaaaaatatgcttacagaaacaagcccatctatttttatattgtactttacccaaatgaaaaatggtcatgctccccaaacttcagatatctgggccatgtcctgtctgtacaacttatggttggttctcctctcccacctttccgtggtttcctggtatcaaactcagatcatcaggtttatacagccagcatcttttcccactgagtcatctcattagaccacctctggattacatttatctccagatgctcctggcccccacaaaagaggactccagcagcttccacaagcctgcttgcagagctactgagagaggagcctctggtaagcacacagatgggaacactggcaggagactggagaggagttggggtaggacgtggacatatgaagagattccagctccagggtacagctgcattgagtgggttgagcagtctgtgcctgctgctgtaggaatagaagagggtcaatctaacaggactaacctgctgactggaatgatatatgcatctgtcatttttatggctattgccaacatgcctttatattgagtcatagcaatttgtattcattccagaaatatgcaagtacctagagctccccacaggcttgctaacaaaatataacactaaatattttagactttctcactgtcagtcttcttggttctccctccaatatatatacatattgattaataaagatttctaagtaagactagattgctaacctaagacaatatggtgacttgctccatcaggaaaaatgaggagtttaactgtctgaggtctaccttttggaggcaaggggattaataacatgatatagtgaaattatccacaaccctgaccagtgtggcctacaaatctgggaagagataaaccaccatctggtgtaggaactttaggaagcacagctgtgaatgactgaggaagccaccactggcacactgtccagtatcaccttccagttgcttgtgccataaatgtctgacctgagtctgtcaagcaacaagccatacatttccaggccaggttaatcaatgtcatcagaaaaggccacacactgtcatgatttaaaggaagaagagacaaccagaattcatccatgcatttccagactgagagcataatttgcatctgtaattttatacagccactcccagatggagtgtaaagaaatttctggttttgtttatcttgtcatagatcatgcttttggttaaatgagccttgcagaaagctttcttgactattctggtcagtcaagcttatattggtttacaaatgcacaggaaactgctggcattttacaaaggacacttgtcatttaattacttttccatgcccctctgcatcccactactccaaattaaagagctgtggtaatttgggattaaattaagcagcttcctacagcatcttcagtcccatttcctgagaagctcatgctgtttaaaatgatgacaaaagttaacctatattgagtggctaagtagcacgcttgccacatctgtttatcttcatcatcacagcaactttatgagactgagattgagctctgttatcgtcttgcttcaagacgggaaactgaggttagctaaatagcctagtgttccttactttcacatgttcagtcagcttatggatgcagctaagtcttggtccagagactggaactggggagatgatggggagacagacagacagatagacagacagacagacagacagacagacagacagacagacagacacacacacacacacacacacacacacacacacacacacacagtcatgtcaagttatgttaattttcttttaaacttcatttagctgactcaggactctcccacacactcaaaagttttcagtacttttaaaggcactcaaacaaatatactgttgaaaaactttgcttttaatcttacaaacataaaatatttttattacttttctatatcttttctcagtctttgaacacacacacattttatgatgttggaattgtagcaatcatagtaactttatagtctgcttttttcaattaatagtatatcataagtattttttatgctgttacatggtattcataattattttaatgactttgtaatattctatgcagttaaccttccaaattgatttaactacctcctattgttagattcatatactcatttaaattcttcagtcataggtgatatatccataaatattttaaagcttatagctttatgttccaacttgaattgcttccataggataaatttctgggttgaataaaaatgtgtatatgtctgtaccaattgctgctgccatggcaatgaatgagcatgtcatttcctctcacaatctcaccaccagcagaacacatttagttttaaatagctggattaatgcagtagtccacaatgttattggagtgtatattaattgatttttattctgctaatatgtgaaaatacaataggtagaaatacaataagtaaataataaatggttaattcttcctccacaccattcaggcttcctctgcttggaacctgagcacctaacataggtcttaaaagtcttgagtttgatttgaaagaaatgtgctgccattatatttagtgaaccctaactcgggttactgattaggttcctgtcttcttcagtgtcctattgctgttaaaagataccatgaccatggcaacttgtataaaagaaataatttaattgggtttttttttttaacacgttcagagggttagtctatgtctttatagtggggagcgtggcagtactctggcagacatggtgctggagaaggagtcgagagttctacattcagatccacaagaagagaagagagacaggcctggcttgggcatttgaaaaggctacacctcctaatccattcaaataatgccacctcctggtgactaagcattcaaatgtatgagcctgtcgatgacactcttattcaaaccaccacagttccaaatgtgaaatgattttgttatattcttgttacctctttgtcctgaccaaggcgacatggtgctctattaaagacctggatcttaatagaaattgcaagttcacctctgtaaaaggaagcagccagttggtaagaccaggttgaaaggtgaaagtagacactaattacctaatgagaacagatggaaacataatcccatattgaccccaaactgaaatctacaatttcctccacgaaaagatgttacctttttgttgttggcttgtgccactgaaggacagaatgaaaaacatcccactccttaagactgtccctgtaaataggctatttttgctgagagtgagtattttcccaaacagctctaataacttattcatctcattcccttggcaaatacaaacattaggctttctaaacaggcctaccatttaaaaaatgctacatggggcaagcaggcactgtaattcaccaaggcaaaatgaatccatgtgtaatcccagattggaaattattgcaaaaggttattttatataacacacacatcccatttctcaaattcccttgtaaaggacactgatggacacctacagtctcactcagggctacattttatgagcagagatgaacaagtgaaacgtgacggtaacatcagatgacaatatctccagagcggttattttggcatggcgtgtcatgttattggtaattcacaagtaaagtgtaagagagagagagagagagagagagagagagagagagagagagagagagagagagagagatctcaggaatctgagtactttaagaacccttgaattctataaatcatagcctcaaacttccacagtcattttgcatgttgaaaattatatgcaggctaggatcaacagtgagtttttttcctctacaaatccttgtatttgaaggttgtaggttttagaatacagttagcccagaacagcttgtacatcaataaaaagtgactttatcgaagacctgctttattgctactgaacgcaatgcatttactatctacttttattttctctgaggaaggtctcagagcaatatggaaatctttgcattaagaaagtttacttcagtgtatcaagagtttgtggccaggacaatcaccccacaaaagagtgggtaccctacaactcaccagcacacgtaagattaatatccttttacagataggggaggggtctcttagcactttaagagtcatcagttagtgagaagtagatggacttgagatgcacagttcccactgttgttctcagcatcatagttatcatggaaatgaggaggaatttaaagttaaagactgagtttgggactgactggccacagtgttatctaccttctccacatcatttcttgacctgaaggaaggtatgactcaaggtcagctatcaaaaatgttaatctattttgcatgcaactttggacacttctaaatctttctcatatcttttacatacacttggctatcatggggtaggcaaagataaggaactgtatgaccatgttttgcatagctgaagacagatggccaaattcatactattgccagtgacaatactcataagaaaatttattcagacgaagtggtatagagttttggagttttcccatattgttgctagtttttaaatctacagatttgtgcaggaagagcatttgtgcaggaagagcatcccagggtctggggagttggctcagaagttctgagccattgctgcacaagcatgaagggcatagttcaaattcccaacaccatgtaaaactctggacatggttgtgatggtgtgaccccaccattatggggggcagagacaagagaattgctgggaccgggggactgccagcccatgtttaataacagaccccgactcaagggaataatgtgataaatggtagaacaggacacccatgttctcctctggcctgaggactcctgggcatgtgtactcatatacagacatgtatacatatatacatatatacatacatatcacatatatacacataaataaatcaatcaggaaagaaaggtggaaggacatacttttgatattgtacccaaagaagagaattggccataatctagattcttttggatccatgtaaagacatttatttgctaaattgctaatgaagtcgatataaagtgatttcttggacactggacttcctttgcctttctttatccacttcaactcaccaatagggttaccataaacgcttctatatatacggaaagaaagttcaggcaaccactccaagatatttttattcgtaactatttccctaaaatataccacaagggtcattaaaatggcagtaatttatgatctattatcaaagatccatatgtaagctctcaccagtttttagtgagtttcttgtcttcctcacactgctagtgaggtggaggacgaaggcacatcattagggaaaacctatgaaggcaattagtggtgggagaaaagaaatgttcatggagaagcaaggcactgtaacgtttaacaactagcagcaaattctggcaatatgatgctaattaaagttttaagggcctgctttatcctttagtcttgcataacttgttctgtccaggcaaaacgaagggaccaagtcaggtaattatgtggataatataaaactctcccttctgcccctgttgtcttcttgtaggggaaaaatggaaaagctagttctgaagttttccgttgcacatgtgtgatatacatatgcagatatatatgcaaacatacactcatgtacatacttgtgagacatctccttcagtgacattgattgtgaacattcataggattcatgaatgcaagccatctacagtttcaatgaagctgaacccaggtggctctctgaccgctcagccattcccgagagccccacactaagagcaaaacatctttttctaaaacggaacgtgatgtctccattgatgtgttttcaaaaatcgtagagatacaatttcttcagactacaacaccagtggaaagttacttgaattacaaagcccagaaacccggccaaatggctgaagatgaactagagctcagaataaagagaggcgagataccaaggaaggctccatggcagaagcaggggtcacatttgaggcagagggagtatacagagaaattactggtgagagaagttttagggagtaagaagagtgaaaagcagctttgctgtttctgcagtctcctcattcaggagtaaaatacagttttgcataagatgcaactttagaccagatttctgaatctggatgtggacatccagctgaggaggcgagcatgcatcaaaaccttccccatactagcacgtcacaaaaggtgggaagacacaagatcacatcgatggatttactaatctaagtaactcagatgccttctccacagaagatttagggtggaggcttggctgttctggggtttttaattatagtggaaatccagtggaggctccagtgtttgagcaatagaaattggagacaaatctgacaaaggcaagaaagaaaactctcccaagaaagataaatgacttgacctcttacacatcagttataattctttgtatcctgacatttctattttcttcagatttaaaggtgcttacaattttgatttcaacatattggtcatctaattaatactcacattctagagttttgcagcagtgccatcatattaaaactattatgactattttctatgtacccataatattcaagttgaagaaaactttacaatttttcaaatatctgacaaaggctggattttctagttttgagagtatctttattataatgtgattattgcatctttacactgttaactaattgtgattttgattctactgagttgaaatagaaattcaacgaacaatttcaggactaattttttaatcagtgttgtctatacagcaggtcaggtatcatttaccaataaaaaacatgcacttgtaagtgaattagaaatgcttcacttgtggaatatttaaatatatttaaatatagctgttaaagtcctgtttgatttaaagttatgtgaatactgtcctttgcattttccaattatttcagatagatatatattagcggaagttcatggctctctcacttctttgcttaaacttttagaggtcttaccctacaacttacagctctagaaatatgtcaaaaagtaaaagaaaaaatgcttatttcttgcaaaaggagaaagaaggtgtgtgtgtgtgtgtgtgtgtgtgtgtgtgtgtgtgtgtacatatattgcctaggtgaatgggttttctttgtatatgtatagataccattttattattatttccataccctttaactgtttgggataaatggatattttaatcactatcactctgtgtgatctactacattatatgtgattagttgtaatcactgaataagtaagcaaacaaaggcatgatcaaaatgcccagtagaacttttccatacaggcttctacttgtatttgtggctagaaaaggtggtataaatatagatgggaaataaatgtcaagaagatcagtgatgaccaataggaggagatgattaatatttatcattcactgtcaggatctagactcacctaggagacaagcctttggggcagatctgtggaaatttatctacagcagcctaattgaggtggaaagatccactttaaatatgagaggcaccatttcattgactcaggtcctggaccaaatgaaaaggagaaagagagctgaataccattgttcatcattccctgcatcgtgaaggcaggtgcaacgtgactggttgcctcaagggactgctgccatgatttccaaccatgatggactggacaatgaaaagacaaaatcttttcttccttaagttattttccttatgtatcttgccttggtaagaaaaagactagtaaacaacacgcagggtaatggcatcgtcaaaatccattatttataccctttgtggaaatttcagtgtcacagaaactagtatttggtactttacacctaaaagttattattcaatcatgctgaatggggcgggggagattcttggttcctctctatataaactcagagtgcagaaatatgtcactaggtagtgtggttgacttgaaaatctcaaattaaatgaaatactcatgagaatttttcaatggctttaacttttaggaccaggtctaaagagtggactttagcttggaaggtggcagagcaacttcatgagcatgggtgtgtggctatggaacaggtaggtgtcacgacaagagacagaaatagtagaatagtgttgcagaaatagtagatagagaatcggtgaaatctaaaaatattgagcatgagattataaaagaaagaatgggtcttagcatcagacactagctaaaatgataggaaagttgaccatgaaggttgcaagtaaaaacgggaaacggggtggcaaggtgctttgattgttagagcgcttgctgctcttgcagggaactatacttcagttcccagtacacacactgggaaatccacaacctcttgtaattccagctccaaggggtctgatgtcctgttccagtgtctgtgggaacctgcacacaagagcatactcatttatagacacacgcacacacacacacacacacacacacacacgaataaacataataaaatcaagagagtgcatatgtgttttggaaataggagttggtactctgcaaaaatatagttttgagacaggagacctgtgtttcctgaagcaggtagacactggagaagggacccttgtacttattagctcactcactgatattgtagaagaggattgactgaggggaatacttactgtcaagtagtttggctggagaagaggacacttgatattttatatctctaagtcacaagtcctctcttgctttattgcataagtaatcgaccactccatgcatctgaatgaatccagaaaactactgtaaattcaatttagattcatggacaaagatctgcttgtgtgcaaagtataggctgtgtcacagagggaagtcaagggcaaatctctctgggcaactgctatctgaactccagtaagaggagagagactagctgaatgtgaatactagcaagggatcagcgtagtcagtgccctgtagcttgcccagccagcatggactgctctggccattctcagaacgcttgagaaattgggtgaaaagcagtcacatcttgggaatttcctgtgcgagacatttgtctggtgtgaaggggcatgcaaggaaggagaatatcaactcagctagcaggaatagtatgagggtagcccctgctctccctacccctttccattggcaggtctccatatggaaaaacaaaacactggcagaaatccagtctagcaggaaaggcaaggaaggggatcagcctgcaaaaagacctttctagtctaaactgtttggacttcagagatataactggctgcccccacatcacccagcagactgcaaaagacaggttggggaggggcatattatcttcattcccttttctactgcaaggaacaaatagtgacttttaattgttttaagtactttagctcctttcttttgtaatcttattgagggtttagttgatgcttctaggtgttttaaaaactatatttaaatatctgtaattaaaaaatagttactcctatttcttattctgtacatagtgaaaagattaagaaaaatctagttactaagaagacaccataaaaaagagagtttcattacaaaagatacaaaaattgaaaagtaaaagcataaaaaacatgaaaaatcaaggcaatatgattataaaagtcatcaataaatgaatgcacggatattgaaattcaaagtcagcttttaaaatgccaatgacctcaaagaggattataaaataaataaactaagggagagactttaaaacctacatgaagaagtcagaaacagataaaaaagtcaataaggaaattgagtttctggaagaaaaagaagtgtttgaaatgaaaaactcaataaagcaaataaaagcataatagaaagcatcaccaatatcttaaatcagagatacaggatattatatttttatgcaaggccaaaatattacatttagacatcaacaaaaaattaaaagtaagcatgagtacaacttcaagagctcagagattatcaagaaaccaaacccaagaacccatgagatagaagatgaggtacaaattaaaagcacattaaacatagtcaattaaattttcttaattttggggccagatagcatccaagtacatgtggcattgaaaattccaaatagtcatgactacaaaagaacccatgcacactaataattaaaatgctaagaatgcatagcaaagaaataatatttaaagacaaaagaaataccagcttatttagaaaagcaaacttattgagattgtaccgaatatattggctgaaatcctaaaagctggactttcatttctaacaaagtcatttgaaatcaataaaaaattaaacactttctaatatgagaatacactaaagcaatttgtgtgtactatgccaggattgaagaagacagtcacaaaccaagagcccacaggaaagatgaatgtcacaaagaatagatgaataagcaagaataagaaaggaccaaatgtgttcaaatcaataagcaatagaatcttagaaagaggaaaagaagaaaaatgtggtgatatattatttatgatttaataaagctttcctgagagtacagaaagcaaagctagccacaagccacagagccaggcagcagtgatacacaactttaatgccagtggccatattagcaaggcatagatctaggcaggggtggcacacaactttaatcccaagactcaagaaacagaggtagatagagctctgttagttcaaggccacactgagctacatgaaatcaatataaagagaaacagctcacacaaaggtgatctcagcacttagcatcacatgcctttaatcccaggatttgagaggaataaaaagaaaaagcaaaatcagtcttagagaattagtctccagccaaactgaggacagggcagcccttgtagtctgctttgctttgctgatcttcagcttaaagcttgaaccccagtctctgtgtttttatttttcatatttcaaaaaaaaaaaaacatgccaaagcaaccaggaaataagccaacaaattacagtaagtagcaaatatttctcaagttataaccctaagtaaaaatggttttggctccaattgaaagctctagtcttggtgattgcctataaaaatcacataagctgaaattaaaaggatggaaacaatataccaagcaagtggaataagaagcaaataagagtagtaaatattagtagcaaataatagtagcaaataattagcaaatagtaattagcaaaaaaatagtagcaaataatagtagcaaatatattagcaaataatagtagtaaatattacagtttatgtatcaaggtcgctacaaattaataaaggacgcaatccatcaataagatatgatattttaaatgtatatgtatgagataccagtgtagtgattttccaaagtcattgtccccatacatgaatggacagagaagtccagatgtaatggatgactccagtactgaaccttcatccgtgcctatatcacccagacagaaaagtcaacagagaaacttcagagataaattgcacaatatgcacttagcaaacatatatcaaacattctatcaaacagctttagaatattaattcttctcagcagcccatgaaactttatataaaatatatgacagtttagaccataaagaaacttttatcatatattaaaaattaagtattctcaaatattatcatatcaccaatgaaattatgaatcaatacaaggggacaaatccttgaaaatacaagattgacaaatccttggaaaaacttacaatgagaaagatgtaagacctaactagtaatgttagatataaaataggtaattaataatagacaatttttgaaatgttatgttgaattaaacagaaaaatttggaagaaattgataaatttctggataagtattatcaaactcaaaacatgtaaacaacataaagtgatatataatgaggaatgagatagaaacagtgagaaagagattctccaaaaagaaaagctgggactctcggacctttatgaaaatactccagttcttttcaaactgttgcataatataaataggtatggaatgctactaaatttaacatacaaatccaatattactccataccaaaaccatttcaggatgcacaaaaatgaacataacagggccatttccttaataaacataaatgcaaaaatcctcatgaaataatttctagcttaatttgtatattacaatcaaattggttaatctgaggaatgcaaggaaggataagcatatgcagagcaataagtgtaacacactacataaatatatttaaggacaaaaattacatgtatcttggagttttattgtgaaaagacaccaaaaggaagtagggggcagtaggtggtaaatgtgatcaaaatacactatattcatgcagcaagatgatataattaaaaccattattttgtacaattaatatttgttaatcaaacattaaatcaaggtctggggatggaaataagtacataaattattaaataaataatcaatcctaattcccgactctccgcactttctgaataactgaatttggaccagtcaagttgacctagttgcagattaagtttgaaacggctttgcatggttaactccaagaatattctcattggcatgagtcagaacagtccatttaccaaaagcaagcatcacatgggaaaccgagggtcactggactctcattgtaaggcttttttttggaaagcagtgcaggagcatgtggcctaatgtagggaaccctgagctccttctgccactcagggacaaggacacaccggctcaaaaaacatctgtgtcattttcttctagtacccgcatcatagcatcgagatctactctgttgtaggaactggaagtaccagagggaaaaagttattcccttcccgttacattttataatttgagaagggtacacagcgtagaacctttattcattcatgaacagcatttcccatgaatataccaggttacagggtcccagggcagttttcctgttaggaaactccctcgcttctttggtctcaagctcttgagtgtatattcatggatctcaaaaacagttctctgagcagcaacattaacattagctggcaatttgctaccaggcaaactccggtgtgccacctagacttggtatatcaccaaccgggttgacaactagcaacgtgttttattggactttttcagtgacgaagaaaacagaactgtgctcctcaaaacaattgggcatctgaaatggccgagcagtgtgcctggaggctctgcgtttcaacacgttcgttctttgatggtaccgccaattctgcttatctgggtgcagctttgtcccactgaacttcctcttggaggagggggcaagtaggcacgaaatcaaatgcagggaaacatgctgggtgtagcaagctcaggttattttaggaagggggaagctttatatagccccactcgcccaggagacccggaagctgcagctctggcatcaggggcttttcgtggcagctggagactggtttgggtcaacttatcccagcttggccacagttactggggactcccttggcagacctaggttggctcaatttggggaagttactactgcatgctcagatagcctgtttattccggtttaggccagcaaggtccttttggcccccaggccctttgtgcctgcgcaaatgttcccacagtctgtgtaccacattttgtggaggaaggtttttggtccttgtggcacttgatgtgtgcagtttggagaattgtaacttgtggtaaacattgctcttctgtctagaaacaatgcatgtagcttctttccatgagcgtctgttgaaattgcatctattgcatcatttgccatggtgagctgctgttattcaattgcttgtcaggatcctctacttgtctgtcgacttgttgaaggcagaaggtacagtctgcctacacagcagccttaagtgcctggcacgtagagccctcttgtgaatgcgacagagccagatcctacaggaatctccacggagcctgtcaacaggagatgtattcaaagtaacttctccgttattttgtttttttatattttgacatccttctgagagttgtttcctgtaagcatgatagactggaatgcaggagctcttcaggcacagcctaagtaagatcagtagctctgtgtcttgcagagagtaggagtaaaattaagctgattttgtttttgggtggtgggggtggggtggggtgggggtgaggggtgttagtttgactgctagtgggctatgactagggactagttaacagttttcttgagtcagttattgtcagttctcacaaggaatctaagctttgaacatggagacttcagcactgtccttaggcagttgagtgtccttgcagccacagctggagctggactgcttttctccttctgttcagattgatatggtcaaaagagtggattatttctttattttgttcccccaagtagatccttcaatgaataaatatgtgtacttagcctgtgaaaatggccagtatcatacttcaaggaaggaacattctgtgggggtcactgttccactctactgctctctgtagtcagaggaatctcttggaataatagaaaattgttatcatcaaggtaatgttgtggaaaaagctaaggatgtccagtaatatcctaataaagtgaacttatctctgggtacagagagaaccttgagagattgcacctcctgtccaaccaaaaagcaagttccttgttgaaagcagccagcgtattgaaatttggtagagaatatagactaactaagcctaagtggcctaagcctacccatcctgaatccagtattaagcgcttgaaaaatctatccctgaaaatgcaggttctatttattttcattataggtttcagtggtgcctaataaagacctccacaatgaaggacagggcccaaagcatcactttctgagacccaggtgagcttgcctttctcatccatgccgcaggtcctccgagaaggttgtggtgcactgcatgcttattagctgtttaattaggatatagtccatcacaaaacattttctctccaactaagtccgttttacttgtggtcatgggaactagtctgctggaatgatttccagcaaagtctggctttaaattaagtctagcttttacagatcctgcagcagtaggaaatctattgttccttgtagacctccagggctataaattgccccctggaatgtgctgctctctgggccactgtccagagcagcagggaagaggataattaccttgtttccttgtcattctctctccaaccaaagcatttggttttcctcttgaaaagcaatcattgcttggtcactcccttcaatagatattttgcttctggagggattatcaggatataaacctgaaaaatacatctgaaatttttacttgtgcctttttccagtcttcagtctgagcataaccaggtgacaatggaagaaaaaacataaacagttttatttatgcctcaagaatgaaaagttgcctggttataaaaaaaagattactatctatagatcccatctaaaccacatgaggtcatgagggtctacaacaaggaagttatttaatgtttaggtcttaaaagtgagaggttgcggagattaggggataactcactctctttcagaacaggccaaactagattgttatttgctagtcagccaaaattaacccaggtaccccggcagtccagaaagacagcatttgtccacccatttcctaagtcctattgaataagcaaatgagggaatctcatgtcctggtacattcacactgtccacattcagaattcatcctgaaggagtcttttccagatgaaagtgcatttccagaacctatccactcaataggaaaacccgaggaaagctcgacagctgcttctgcttgggcaggctggatgatttattctgatgtaacaaacaatggaatctaaatgaggtatgagaaggaagaaaaaggaaggaaagaaagtttggcaactctgcctatccgggggcctcctctcagtgttaatgtgagaaaaggaaatggtatttttattttcattaaaatgcaaaaagcatcaaaatcagaaaatagatcatctctcctcctgcctagaagcaaacagaagcagatgagtgtgtgccttctgctgggtgtcgctaggggcttctctgacaagatcagcctgaatggagacacaggggccaggctgttcactgtccatgaaggacatacaaatcccctgctgcttctgcagcatgcttcattcattcactcattactccacaagtctatagatgtctgtggagaagtggcatttgttagttctagggatgaaaagatgagcaggttataatatggtcagtctgataaaagggatagatgagcaagcaactaacacagtgttttaagtctcctgcataaaagttttaagagcattttcaagaagggcttgacctcagacttgggacatcacagaagacttcagacaaggttgctatctagccacattctccaaactccccctccgggttttcttacaagcatataattatataatttgtaatttttagtagttgtcaatgctttcgatgtcttataatgactgatctctttttatttctctgtagcaattaaaggctactgtgttgtctagaaatttctctttaggctgtgatttcatcactgacatcctgggaagtgtattaatccaagtgttttagtaaaagaggtttaaagtaagtcagcacttgtctgaaaggccatgagactagtagaagagtcaggctcagcatgatatggaggaccctggaaaagatgcagacaacattccaggggaccaacaaccactttctgctttgtcagagcttggacttttgccaagacctccagatatcagcccagctaagagttctcctctaaatcgacagcttgcttctgctgctcttcagctcatccattctttctccaaccttctgacttctggccaaccaggctatcatcaaatcaactgagggccagctgaggatgtccctagtatccagtttggccttattgaggacactgaaatttctcccttggataggtacagaaaaataaatgatgttagaacataatctcacaggtaagctctgtttgaccaaaccaaattgttaccaggcaatgtttgagccagatgtaacagaagtaaggtttcactgctgttcttctacccatgcccgaagttcctattttcatggtaacacattaaagataaagaaataatgcctagtgccccaggccagcccatgagcaatcccagatcacaaatcccaatttcgtttatgctggaatttctgtactcttaaccaaaagcaatttatagcaagaatttcttctacaacaagcatttgaactgattagaattcaatttctccgtctctgcctctctctggttcccctctccttctctcatttcctctcttctccctttgctgtagctctgtggctgtttgttttatagattaggcttggttttaaagttcctgtaaatctttcccttaagtaaaggacaggttgctgatctgtatgcaaatgatatacttgcctgccttaaaaatttaagattgactttggattgaccccatgctttatccctcagcagagatctatgaaaggatatttataatacctgtggatgtagtgcacgataccagtgggacttttcttcaacagcagatgaatagcagaaacatgggcagaccgaaactgatttccatagctggatctcactgtagcattctgcaattcttccttttcatataccttgaaatgttataatttgctataaaaataaaggctataaaataaaaaaatgtacacatatacacatataaaacatataatggtatatcaagtgcatctctcaaactttataatacaaatttgttttacttgatgtgtatattaacagtgattttagagaaaaacttaagtaatttttataatggcctttccccctctacctgctgaaaagccacaaaatctccttcatgttggaagttcttttactgcaaaatagatacttcagtgcatggtagcttttggcgctaggggagattttctttgttttatagcttgggactcttcaaatggccttaaaaattaaaatagagcagaacaattacttgggatgaaatatagatttcttttgtatacctttctcaaactcaaactttattagcatggaaatggagtccaaaggataaaattgaatgagattagcatactgatacttatcttacaataagtgtttctcattctaaacttcaggaccacactatttcagagcaactctttttagtgtgtatcttttatttctatggtagtggctaactgggcaatgttctcaagagactggaaatactccactttactgagaaaatagttagaggctgtgtctttaaatctggaggtcacatgttaagtctttcccctaaaatttttttccctaaccctaactaacccctaaacctaaacctagccctagccctaaacatagcccatggctcacagtggagctacaagaagtgctgggcctgtgtgcccctacaaaactggtagggaaagatccaaaaaaaccagtagtctccttcctttgtccctgtccccctttgaagaaatttcttttctctccatctcccattcagggctcacatactctttgttgtcatttcatttataagaagcccaataccagtctcatttattgagtattcagcttatagaaacttctgaatacatgtatacaattgaatgaatggatgaaagaacattttatggtgactagacagaagaattacagagaatgaatggatcatatagtgtcttagttactttttctatggatgtgatcagacatcagaagaaagagtttatttgggatctatactttctgtggaggagttcattaccgttgtggtggagagcgtggcagcaagcagaaggccatagtactggagaagtagctgagggcttatatcttgatccgtaagcatgggtgggggaagctaacaaggaatcttggacttttgaaatctcatagcctgtcccccagtgagaaatctcttccaacaaagtcacacctcctaatccttcccaaacagttccaccaactggggaccaagtattccaagacatgagtctattgagggccttctcattcaaatcactatattcagtatgaatagatcctttaataactaaaaaaaaaaaatcattgagtctaactgtagtccctctgttgtggagcaaatggggatcaatatgactaaggagttggcatttgtttttgaagaaggaaagggataagtggcatgagaggggtggaatccgtagatagaaactgatgatgtaaactaatgcagcctctatggtaatctctattaaagctctccccgcccccccccaaaaaaatcttaaaatgcagctactatgtgagctagctatacacttctaggaatatgcccaagggaaactaagtcagcaaccagagacatgcttatatatccatgtttgttgcatcattgtaagtaatagccaatatatggaaccagtctggattcacatgagcagataaaaggatcaagaaaatgtgatgcaaggctagggagatgactcagtaggtcaaacacttgctgcacaagtgtgaggacctgagtttgaatccaaacaacccacatagttctataagcagtagtttgcatctgcaatcccaatgctccaacagctgtatgagaggcaagagtgaggagaagtatccagactctcaggggccctgacatacacagtggtgaaaaaatgagaccctgtctcaaagtggaaggtgcagactgaaattcagtgttgtcctctgaaccccagatgtttgctaaggtctgggcatctgcactgacacatagtaacatgcgtgcatacaccacacatacacacacaaaaatacccaacatgtgatatgtgtgtgtatacagagacaatagggtttaaagaaaggtaattttatgtcaattataggataaatcaatagaactggatatcaccatgttaagcagtaaggctcgactctaaaagacaaatattgtatgctcttcctcatacaggcttaaaagagaggggagggggaacaaaaggcaataatagaaaaattaatacactttgaaaacatgtagactctaaagtaaaaacagtatgtttttattcatatatgtatacacacatatgatatgaaagcctaatggagtatattgactgtagtggggagaggggggactggaaaccagtgggagtacggaggacagagcatgatgggaggataaatatgaataaattacaatcatatacaagtatgaaaatatcataaatacaatccattatattgtatgtttattaaaaataggtagctttgttttgttttagtctaattatcccaagaccttcctgcatgttctggtctgatgttattgagaaaatggactatttacattagtacatggtgtgttctacagttagagggaaaggagtgggtgcccatgaagatgaaagagagagctcttcagcctggggtggaacagtcatccaggccctcttctgtttgggaggagccttggtgtgcaggcctgggacatttcctgccttctctgctggcaaagtgttcttcaaactgtttcctggaggctgaagttcttcctggttccaggttcattaatctgaccaaagctacctcattttctcttttctcctgatttttccttctgaggaaagtggagaaaaaagtcattaagaggaactaagtcagtctttctgtgagaaagttgggaacgcttccacagtgtgccacgtggaataaaatgtggcatttttttcatattttctgtaggcaaattgatggatgatctaacaccctgtgagaccccaggttttgtttgtttgtttctgattgatagaggtggctatggatacattatctttccaacaggaattgaattctgatgtttcttttaagtagaaactgaagtatttaatctctgttaaagaactttctgacttcattattcaggtgtagaaaaacaataaggtttactaaggaccttcaggtccctccatgtaaagagcttcctgactgtgtgtgcatggataggaacagctgtgccaagttcaagctgaaaggggttctggtgctctcactggactctgatcatttagtacccgagaaagaagcaagcagcctcgacatccaggatctagttggatgctgactgctgagcctcaatgctggttgacactaaatgactcaaacaatgagccaggctgttctctcactggacttggacaatcacatggagccaatgccagacaagatcactgactgcttcataggagtgttaaagcacagggttccaaatactatattctgctttcttggctaatcaagagaggtcgccgactcttttccaattgcagttttatctcttctctactcagccttccctataaaatgagccactgagatggccaactgagttttctcactgacagacttccatccagagggagtaggctttctccaaccctcccccgggttatcctgtgctctttctgttacatttttcttgggacattcacactacttttgtctcttcccatgctaatgtgctttcaaatgggcacagcctccttaactgaaggatttggcttctaccatgtgatcatcctactttatattagatacttcagggttttggtcagtatgttctatagtttgcactcatacacatatcagatgcgtgactgatgctatatatcccaactcttaagttcaccatgataaaaaggggaaatgtatcttattaatgaagagtgtaggcatctaggtttacttcaagagagtagatgatgaggacaagcatcctcattaaaaattgtctctccatttctcattctttttcatactatgttaagaaagttcttgaagcaagcccaccatgctggatcaagcaaaggtgttgctttagctgatcaagctgggttacacggcctgcttctgtgcctagccaatatggagcaacagcttgggcaaaggaagcaactgagctgaaagccatggtgtgctctgactcatactggagggccaggagagtttggagcatatgacccaaagactcttggatataagactgactcatgtcactgctttcttggacggactgttggaaagtggggatattttagagatgtcaaaagcttatccagagaaggcaaatgtaaattcagagggttttcatagtgaagggcctgtggaagtaaaaaaaaaatcagtatcagaaacataactatgaaagagcaggtttttccccactgacaaatgagcacacataatgtgtgctgcagcagagcatggaaattcgttttcctgtcatgagactgctgtctggtggctctgcacagcttccctcctagttgcccttggatcaaaggtgaatgacatgtcctttgggaacatcttcttcagtgctttaaagctatgggattcccagtgataacatttcacagcagcatttcttgcataaggtttaccactgtttccatcttatgtttatttgtatagttgcttattgccttctgtactgttgactccatgaggctaggttgcccacatggtgctgtatttttcatgtagtgatatgagtagaacattgctttgttaaatgtggtcaaaagcataaactttgcagcagcgtgctttcaaatgtctcagtacttgtctgagaatcgtattgtgcttccttctcttaaaggtgtgggctctggtatgcaaccagtagccatgagggtgtctaaagtccaaggtgtagtccagaccagggctgctgctgagggccatgtctagatccatggccctgtaatagcaagggtctgagttgatatctgtggttcctgttaacatcacgggccatgccgatgatcagggtctggtcaactatctgagaccatgttggcatctgagaaccatgccacttctggaaccataccaatctgggtggcctatgctgttcatggaggtgcccaggctcaggctactgcctagggtcatgtctgtggctgtgtcccagcagtggctggagtctagggtgacattcatggctcctgttaacacccagggccctgcagatactcagagtctggtcagccacctgagactatgttggtgcctggaggccatgctgctgctggggtcatactgatccatactgatcctggtgacttgtgtggctacctctgccatggtgacactttgcccttgctgttgtcaaggtctgtggtcctactacagctggggtctgagagaatatctgtggcccatgttatcacaggggtcattggaactgtgatgtgctgagccagtcctgccatttactggccataggatagctggccctgttcctcactgtatacaacacaagttctgatccagcccctcaagggagagctgacccccacactcagaaaagatggccccatccctcaccacaggtatgcccctttcctgaccctgtggtctgggaagcagataagcccaccaagagagcaagagagccgaccccgcccaactcatctgccatgggtgaaagaaaatgccatccactgctttctacccgaagcaggtgaaagagctaggccctgggagtgagagaattagtcctgtccctcaccagctgcaacaggagagcagacctataccccatctgaacaacacactagagctgaccctgttgctgggtacacaggtaagacagccctgaagatgtgaaagcaagagagctggcccacttcagcaattgggacagaggaccctgtaccttgcttgggcaaaatgtcagagtttgccctggtggtttgactgtgggatgattgtgtagtgacccagatctgagggcctgggagcaggagaactggccctgctccttgctgcaggctgcattggatgaggtagctgaggcagcactggagagcttgcctgggtagtgataatgagggagagctggcaggctaaccaaaccagctgccatgcatgcccaccccaacgtccatgaactgctggaacatgtgaaggggacatcaaaacagcaggatctccatgacacaggacaacaggatatctaagaggaaccccaaagacagcccacattggtggcatagcagaagcctgaggccttgagtcagatgggtgacttatggcaatgaatgtttgcaagtaaaaaaaaaaaaatgaatggattcaagtgtaaactatgtgactcaatggaccacactgttgcttccacaacaagattcttctctctgtgtatctcttttgtgttgttttctgtgtttcatttgatttttgatttttcttttaaatttggttttggttttggtttgggggagcttacaaggacagagggtaaatgtgaggggttggagagataagtggaatctgaatgcatagtgtgaaatacacaaagagtcaataaaggtttaaaaaagtgggctccatgtgaccatctcaattttatcaagtattaactgtttttaaaattcagcagaaaacatgggagggagataacccacataaaataggcaacagatttcacaattgatcagtattttgaaactccatacctactctcccaaggataagtccccttactggttgtcaaatggagagttgtcagctggtatatacacacaaacaacaaaaacagacacagcaggctgtatttataaatatatatatttatatatatttatgcatacatatacacacatatgtatgaatgtaataaatataatgaaagaaaaagaggctgtcaactctggagtgggggtcttgaggggagatagaggaaggggagctaggaggggctggaaggaagaaagaggtgatgtaataagacatatttctttttggtctggagcagctcatcccattaccctaagaatttaggtcaaaagaaacaggctaactgaagatttgtcacaattgcccacttacagcaaatgtcagatcatgaggatggaagtttgtgactaggtaaattacctagttacaaacttggtacacaaatataccacagggctgaaatcagatttcctttgacaatctgtggaggaacttcgttaccatagttgtgagattagaaaggacacacacacacacacacacacacacacacacacacacacacacacacacacacacacactcacaaaacagcctctaacttatccagcagtgggagactgtaaaacttgattattgcaaaggtaggctggcatattaattaaaaataagactgacatttgaagcgtatttcaaatttcatggcaaatttcatcattccaaatatagtttcagattaattatgacacatttggtgctaagctattttagaattcaaaacatttccatcttggaatggttgcagcaaattaaggtacttgatcaaagctgcagagaaagggggctggatttaatattctgcatctcctcataacctgcctttagctttccttttctctgcacgttaagtctggagaattatgtgaggtgatggcattttaagtataaatgggatttgacattttgggtgtaaataagagtggcttatcttcttgtggtgtgagtcactgattaccagtggttaaaataaagtgaaaaccaccaaaatgggagtgtttatttcctcatactcacaccaaggcatttcataagcagttactgctaccctcactgtgctaacctttccaattaattgtctacttcatggattgataatgatacttcttccaaatgattgttacacaaataaatacccttttaaaatatggctaggagctggggatatgccattcctttaaaactggatggataacaggcatacctcttcttccaaagcacagatagagcagaaaacagattttttataaagattgatccattaccatactgaacaagacatatggtttacctgtgagttctttttctattgttaaactgaagacaagtggtgagagggtgggctcggaggaaggaactgactgagaaagggggcttctgagttggaagggatatttcattaaaggaagcttagatcatgtccatgaaagacacagaaggtagctcaggcttacccagctagctggttacagagctagccctgacagctgaaacagatgagttagatgcatcatttactatccatgttttattttcttcacttataaaacctacctgttgatgatatccccttgagttccttctgttgctaatattcaggaactagtggtgtcaatcaatagactgaaaaatttaattctaagtttctgctatttgaagagggggtgcttggttaaaccctctaggcttcagtttcttctctgaaagcagaaaaattagttaacctaacacaactttcactggttttctctctggagagggctgtggagcacagatggacaagggttcctgctgttgtggatcaaagtgtccatgtatccatttgttcattttcttctgttccaaaaagtgtttaccaaatgctagccattgacaggcagtactatagactgtggacacatcaaaacatatttctagagcccgtgagatggctcagtgggtgaacatacctatcactaagtcaggagacttgggttagatcctagatgttagaatatagggttaacattattctactccatcaattaaataattaaaagacaaggaaaagtgaaagttaaagcataaaaaaagaaaaagaaaaaaattatttgcatgtgaaacagagtcctggggaaaagaggggccccagagctgggagactgctgactttgagtggggctgagttttcttgggttcaaaagtaactttccttcttttctctataggtcccttatagttcataggtcttttcatgcacgggaattatttcactcttcctctccatgtttggccatttaccttcttatagggtccttatctcagggcaggaatttagaaatagctgctggctagttagaatttgtcaccagtcaaggcacttcttcagctccctacttgttggcatggtaacaggaaaagagaaatttaccctataataaaggaaatggaaacatccatataataaaggaaatggaaacatctcttccctttcttcgtacttcttttctcaggacctatgtgataggagagtatcaactcttgaagtttgttccctaattatgtgtgctatgatgtagtgccaagcatgtacacacacacacacacacacacacacacacacacacacctttctggagtagagacaggcaaacaaaaattccaagaaaaaaggcagcaaacaagactaagtattaagaataaaacagaaaaagggagggagagttttgttattcataaagatcttatgaaaaacattctcataaaagtgacatttacactgaatattaaagcacaaaaagaaattgagcatgcagagtagaagagcccaactgtaggcaaataagaaaaccagcatggctgtcagtaagaggagatgaccaagggagaaatactccaaagacaggcagacattcaaggaccttaaggatttgtctgtgccgagttcagaagatcctaaggttttctggtagaagcagcaatgatgggatctgaatcagacttggagcatctttttggatgattgaaggtgtactgattggatgggcagcagtgaagtgagaaaagcagccaacagcttgttgcagtaatgaagataacaattcccactatcatggactccaagggagacagggcaagtgggaaaccgtagtggactggggacattcttattttaaaataaccaaattggccaatgaattatctcttgcatcatatccctggtattatagcttgaattttcaaccctgaaaaaatcacaggttacagtctcaacccatagccccttaccatgtgaccgtgtttggaagtaggttttataaagaagcaattacatgtggctgcagggtggaacctattcaaatatgacacacattgaccttaatcttatttgagaaattaggacacaaacagccatagaaggatgacctttagaaaacacagggaaaggacatcttcaagccaggaagagtggcctcaaatcaaggccagcactttgacagactcacagactccagagttgtgggaaaataaactaccgcttcaggatccagtatgttgtgttttgttacggccatcttagtttagaaatacacatagtgtgtaggaattcaagacaaaaggataaaaccaaggctgaccccagtgctggggacatacagttggagggagggatcttggacatgctctaattgagacggtgaagcagcagagcaggccgccaactcttcagttcactttgtgcatctgagtctcaggggaaaacagttagctggagaaaagtaaatatgatgtcatcatccaaggctaaaggagtagacggtcactagggagagaacagaagaaacagcagtttaagtctgagctcacaagaactaactggaataatcaaagccaactaacaagaacccttgaaggaatagaaggcaccagtgtattcaacagcaccaaaggagaaagctcaagagtgggggattcatggtgctttaggttctcaaaagatgacggagattcaagaaacacccctagggaaatgggttgaatggtgtttcttgtgagtgattttgcacaacagaccaatgtttgaaattttgcagggagagacatcctgagaaacatttaggtatgcaatggagacaaggaaagagaaacaaggcttttgaaaaatttggctaagaaccgagggggagaaaatgagactgcacaaagatggtttattttttttaagaggagaggtgttatgcaaccagtgtacgttgatggcaatcagggacaacagaggaaaggcagaaactgatgctctagagcatacaatgaggaaccaacagagaaaagcccttgagaagctgagaatggttatgacccacttagcaccgtactggcacatagttagtgagagaaggagccccgaacacagcatctagagcatgccactccagcataggactactgggtaaagttagtacaagctcactctggccattcttgtttcctaaagcaggagaggaaatatgaatgcagatcttcttgcaccagtatggaagcaagaaaccaagactgaggagaatttgattaagaaaaccttgctacatttatattcctagtagttcactacttggtctaaataactacccttgctccaggcctcttgctgggcacatttttttttgatttaccacatggtccacttcagtacatgaatatccctgatcttaatttcctaatgaaattcttatgctatgtaaaagttgaattaaatagacttgtgtgatcttttttctcctgttgactgtccaattgtaaaggcacaaggctgagtctttcaaacacaaaatagagagaagaaaggcaaccctttgcctcctctataccagtaaagggggcactgaagatggagacaatggacagtggattccaatcagcgctgagcttaaagaggaggcaatcctgacaatagacttacggtaccgagctaacagagcaaagctgtttgccaagacattaaaaagactcttcttcctttgcccccccgcccccacatgtactaaaccatctcccttctcactgaaaagtgtaacaagtctacaaaagtaacttgccaatgcctaatacaattagcctctctggagattttccccaggagctacaacatgaaaagcagaaagagaagcacgtgccaggattcctagctgcagcgttcactgtataaacaaaatattagaaacaaggtaagtgccttaagagtagactaattgagtaaaccatgcaatattcacaaagtgttttaaacatagttgaaacagaatgaaggaggagtaaggaagacctttatggttttcttttgttgctgtaacaaattcttgagacaatccctcttttaagacagaaagccttcagaagtttcagtccacagttccttggccatgttgcatgggcctgtggcagcacagtgctttatggtaaggcctatgtagagtagatgggagactcacttaactttggccagaaaacaaagaagagaagaagataaacgcctggggtcccaatattttctttgaggacacatccctagtgaactaacatcttcccacttggtgttaccttctgtaggttctgctctctctggatattgctacaggctgtgaaggaacctagtcttcaaaacattgaactttgatggacaattcataatcacaacttggcaccttgaaattgaatatcatcaaagtcagataaacaaaaccacataacaggttcacagcatatctacaccaaatggaaattagatcaattcgtctttccttgatcagtgtcttagtcactcatcttgttgctgttatataatatcccgaaaagaaagaaacttgattaagaagggttcattttgactcacagttctagggtacagtctgttgtgttggggaaatcctgatgggaggcttaaaatatctgcagtcaggaagcacaggaaggtgaatgcatatgcataactcattttctccttttcgaacagctcaggatcccattggggtagagcttaccaatcaagtcttcacacttgctaaatgcaagtgtgagtaggttactgtactatgagtcatctgatgggctgcagcaggaactggttacaatgtcacttaagtggcatccttacccaaagggttttacttggcaagtctgtgcaaaagcaagcaattaaacatcttgactggtatgttcacatcttcctccaagatggtcagttatttaagctctcaaaatatgcctattccattggatcatttataaccgtccatatcaattttattcatctactatgtttaagtaactctttactctcaataagtgcatcaataggcaggtatttattccatttttataatttgttcttgaaattacctgtattatttatgcatattaaggtttaaagattgtagtcacttataattatcaatcctttcctctatggattctaaaatagaaggtgacttatttgtgagagaacactgaagggctgagagttttactgagtcttatatgatgcagattgatctggcatgtagttgcaaaaagccaatggtatgggaccctctggattgatgctgtttccttgcatattagctagtatcttctttttactgtttatttattgcccccatacttaggttatttctcttctccctatctaccatgaagacaccaaaggccaaactggaacagaccaaacttttacttaatttataaaccagaaatgtaggtatgcaaataagcatgtccatgtcacaacaaaggcaagaaaaggtatcagatgagttcagaagacagctctctttcagccgagaagaccaggaaacacactggggaaaggtaaacatttggtgtgggtttctaactctagatagactttgatgtataaaaggaacagaagtccagctgcacagacagaacaaaggacaatatgagaaagaagtctcccgaagttagcctagtctgaagagaagaatgaacacataggagcacacctacatttgggttttgggtgctgttccatctattccttcagctttcttcagtgtgtaccatgaaaagaagtgcgggcattgattgagtgagagagaatggtagcatgtcagtcctggcatggatgtcttctcttaggaaacccctctccactatgatagtcattccccaagtctgttcctcagtttctgaacttttaagtactatatcctgacccaatgagcaacttgccaaagtccaagatgccacctactaccttattttacttaaaatgtatggagttacttaaaacaggtaagtagctatagtgtcctctcttaggtgacatgtggttttctgggcccacagacaggcaatctcatgcttcttccgcctctcatcttgaggaagcccaggaaagtagcctttaggaagacttctcatttaaatgacacataattttcttaatctagaagacctatgtgccccctcttccatagcattggccacagctggtctgtgtgacagtctccttccttatgcccaaagcaattgtatcacttggcattgtgacctgaggggttggagctatgagagagtaatgggatttaaactccaattcttcttagcttttggcaagggttagtgaatggagataaacttaacacctttgctatttttatatacacacgaagatgtgatgtcgctttagatttgaaacatctaaaatttctccagagatgataaataaaacaattagtagaaaggtacagaaagcctacctttggctaaggactgagtctctgtttttctcctggacagtattgggggaaattatcttcatgaggtttttattgtcactgattgcttggaactcttccttgagcatgtgtcaacaaattgctccaataaaaggacttgcaataaatccccagtgtcctgtggacacattgccttgtaggtgtgatccttctcagagatattgcagtctggtggttcaatggctttgtaatctaaactctaactggttgagggaactgaacagacttgtgttcttaaagtaatgacttaaagctacggttctgaagacacaagagtttcatgactctgtttttctcttatatctgtgctgataaaagtgttctcaaactgaggagaggtaactgagtctgggagctgtctccaaagaggaacttttgaaataactatgtttattgctgttggagaagaaaactcataaaagacacatgctaaaagcatccaattttggaaggaagtaccattttagaggaatgagactgatattcctaatagagctgaaatggaaaagttggaaggggagaattttttctaactttttattgattccttgtggatttcatatcacgcatcctaatcccatccattccttatagcttccttctggccttgcaacctctcccccaaaataaaataaattttaaaagaaaaataaacaaacaaaaatgtctagtttggaacctgtagtgtggccccctgagcccgattctctagcagcagcctggccactcaggccacagcctggtaggaattctgttcccttaggcaccagccctgtcgctaaaggtagctttaactaaatctctatcgctgtatttataagtaagactgagattcaaaggctgggctaaaaacctgctagttcagagaggctaaccttccctacttgctggcatccctaagagacctgtgcttttgcttcactaaaccagaaaagattagaccactctggttctactacttcctgtgtccctctgtctctcccagatgccctatgatgctctatggttactttctgtcaactagttgctaattacattttatttaattaatgcaaatagaaactcaggggtcacagtgtgatcaaatatctcccaagattttcccctttttgtctaaataaaaacaaaaggttttaactctacacagtgaaacaatatagaagaggaataattatcaggtattgtctaaaattaaaaaataattttaacacaatgaaactatatacagtaagaaaaattatcaaataaggattatattcacaagtccagtccatttgtatttcacaaattcagagaaaatactgtaatatctgtcctatctcagtgatttcaaagttttgtacctactttactttctattctaacttgtattatcaacccaaaactatcttctcagatcttaaaacattttcttaaaaaaattaagcttttatgtctctcagccttgtacactttatatacctctttcatttgtttcttttctggatttggtaacaaggaaaactgtaactataactgtctcatcttcaacttcatcagagacctgagaaagatataatattacccaagtatatgggaagtgcagagcaaacaactccccaaactaagaaatgacagaaacagctggctgcctggacagtcacccaaggtttctatgcaacattggggactccatcttagcctaaaggcctagaatatctgacagacttttctgtgaagcaggaactttgaaggactgtcctaccttgtcttagcaaagttcagcagttactttcttctgtgtcctgcttgtcaagtctggacaacatactgttagcaagggcagtttcttgcccagtggctaactgccacaaaaagtaaactccatatggaggttgttcaatgtccatcatcctttttttaaagtaaattggtgctgccaagagcagatgtgtctcactttcatgaaaagctttatgttattgaaacaccttaaatgccatattctgtaggtctctgaattgttcgaggacaacctatctatctaaaatatatccctgtttaaccttaaaaacatatctaacataactacaagtttgattatagtgggtaactaactgctaaacttacatttatattattatatataactacatttcttagttatatactacattttaaaatgagttgcataggtacaatacattaaacaagaagagaaacatatatagtataacaaaagtaactttaagtttgattcttatatttttggttgtgagcctagcctttaatggctgagccatccctccagcccattaagtttgtatcttaaatatgcaaagtaccttaaacaacaataaggacattatatagagagtatgttctatcaaaaataaccttaaatttgtatcaatatacaaaaatccatagcaatgtaaaatatttgagattagtagttgctttttagtttaaagtagattcaataatctacccttttatcctatcctttccatatcccttatcttttttcttttcagaaagagatccttaaatgcaacctcccttgccagatcccctaagcaatgacaaacattcataacccactaaatggccaaaaaaccacacaccccatctcttaggaatgtggacatcatattcttaaacttacttcctgttttcttggggcaatggcatctatagggggccctgaaaagattgggatgatgggaaagtcctgggtgagttagccatattatttttttgtttagtctctgtgtgatgggaaagtgtaaggcttacctgaagccttggctggatagtctatgaggctggaccatttcagttaactgccttgaaattgtcctgagcagcttgtagttcaaagctgatccctgggtggtatttgccagcttaatggcattgccacaatccaagtggaattgtcagtgtggggccccattattttttggagacttcaaaggccactgttaggaatggtcacaattcactccagaaggcttaaatgttttaaaagtcttatgcagcagatctcagaaaggttaaacgagcacattctattaagtataactgggtacacaaacttaattcctagttacctgaatcagactcaatcttaaaataatgtaaggaagctagatgaagtctatttctagaattacttagtactctatataaccattaatatcactacagaaagtttatatatatatattatataatacacaaaatatataaatgatatatatgtagtaatcttataaagttagagataatatttgtaccttagtgacaatagaatactcccttaactttggttttattctttcccatatcaggtagctcttctaacatgagacagagattttggatttttctttagcaagaatgcttgggtttagagaaggagtgagccatattcaaactccaaagtcagccttgatttttaattgtattgggaccacattttcttgggacatttttctctggatgatttgtccttcttcagatgtctcaattgcccggtagttgtcagattccttagttggatacttttttctcctgaaagacaaaaacaaaaccctgtactaagcctaactaagggggaggggtcattttttgtcaggttatatctctgttaagacaaaatgtttggcaacagaaaaaaatattatcttttaataataaaaaatattttattatttctttcttaccagataaaatgaaaacaaagcctgttatgttttattagagatatatgctggagcattgccagtcttaatttgtacatgtatctccataatagccattacctctggtaatatatacttgcagtattagccttttcagaattcgaagcaattgcccattgaaataatgtatatgtatctatggtatggtgcacatactcaattttccaaactctgcaaaatgaaacacatccatttgccagatttcatttctttgagtattgtttgggttacttcctgaaggtaatagagtttgattatataaagaacaagtgaaaaagcagtcttttaaatcaatcactataatagactatcccttaattagtaagaaggcaagggaattcgaggctgtaatgagcccattggctgaatccccttatttatggctcttaaacttgttaacattcaccattttctagatttctttttaataacaaatacaggagaattccaaatactggtcaattcttcaatacattgagcatttaactgctcatgtaccaactgttatcatgcctgtaatttttttttttatgtcaaaggccattgttccactcacacaggtttgtcagttaagcattataaatcagaactgttggtaactttgaaagaccagcaactgttttgccctgcttatgcacaacttgaacaattagtgactatccttgataaaaccctttaatagttttctcagaagcatacattaatttatgagattgaaggaacgtaaatctgtgttttctattgttgcaacaaatcatgtccccgtaagttcattgttatgttagccacatgtggctttaattttcttatatgtctttctggcactatacactcaaccgccttgtattttgctttacctgagataaagtttcaactcatagaagctgaacatttactttctgaataggccaatctggatggcaaggttttggtgaaattattgtcgcatctgtacatgtgcctactacgccctcaatttaaacgctatttatttgtatttttagttttggcctttggtaatttataaaagtttgcccaaaatatttgttttatggtctatcctgaaaattttgttttatctactgatgctgttagtcatccagagcagtatagttttttaacaatagacattaagtcttttaaatgctctgtggagggatttccccaatgcagacagggaatgattgaatcaaatttgtcattgaagtcggtgagaagcccactaaagcaattcccaatggcaaaggattatctggtctatcccctgttgatctgcattcattgtccaatgcaggcctttgccacaccttctgcatattccagagggctgaggtctttcatttggattatctctagaaaagacattgtatctaggaataccttgcctccaattcccattcaaatgaccttgtttactacaattaaaacatcggaccttttgatttttcttaaaatttttagaaatcacctctcctattcaagtatcatcataagtgtgagattcattatcaactgtatttcagaatcattcatctatgggtgctaatctttaaagacctaatcaaaattttcattctaaattagcatttttcaaaatccaaatattcaattaataattgtctaacatctggatctgacatcattctatttacagcaagggttaatctttgttaaaaaaaaatgagtgaaggcttcttttgggtcttgtataattatagtaaatgacttagtcctttttcccgattcttcaaccttattccaaacattcaatgctcctataaggcatagaatcaaggtgttatcatcaaatatataatgtcttagcaaatcaacttactagcccttacagagaagctggtcttctagctctatctcattgtactagtactctagattcctttttctaccatgctctcaactgtaaaaaaaaaaaaaaaaaaaaaaaaaggaccagcttccaatactgctgtaactaaatcttcccagttggttggattaattctgttcccagtagtccatggattttacatctgtttcacaaaggatgaatgcgtactctatgaaatgactacttccttaaatcttttcaaatctaacatatctacaggattcaaattaacttctgcattgccttgagggtacccaccatcttgtggtcattcttatatagtagctgaatacatttaagttggtgttctaattacttaggcctttcagtttcataatgcaatggtgaagtaggttcttctctgaattcctctgtttatgtctgagtattttttttcactagtacatctttctaaagcttgtatcttattagtagtaagtctttttgaaacttttgtcttatcagtcagattagcatatttggcatggttatcaaaccatgttttaaatgataaaatattaagtaccaaactgatagtaattacaattgacattttgttaatcccagttaagacatttatccccgcatttaaattttccatttctcaaaccatccatagtgacactatgcagggtcctagcacccttcactgtgatgttccccattattaacatgggaaagatttttcttgttaatagtatttaactctctactgaaggacttccaaggtagttcatcaaatttgctgacttctcagtagtttgtctgcagtgttggtggttaactcaagcccctcctgcaatttctaagcactaacctcatttccagagtcccagcaagtgaaagctgccagctgtgagtgctcctttgaagaagcacaaatgacaactgcagaggagctaggtgacatgactcctctgtctgtgcggttgtgccatgcattggagcaccagatattttaacttccggcatagaggctaggccttaatctactgttatttcagccagcaatggcaactccacagttaatgacctgcttctctagcagcatcctggccactcaggctacagcctggtaggaattcccttaggcaccagcccagtcactgccactaagagtagctttaactaaatctccatctttctgattataactaagactagagattcaaagactgaggtaaaatagtgctagctcagagaggttgagttcaattagcaaaccttctttttcttgctggaatctccaaaagacttgggcttctgctttgccaaactagaaaagactgtgccattcccaactccatcctactacttcctgtctctctctctctctatctctcaggaaccttcccaggctccattactttctgtcaacaaactgctaactcagcctcctaacccaaggttagttttatttaattaatgcaaatgcaaacttggggttcacagtgtgattgaatatccccccaacagtagtgactatagatttgttcaggtataatttctctctactgttttgttcaacatatttgatatgcttaaatcttaacagagataaattccagtagcaagtttgggcccaggttgagtgtgataaaatacaaaggtatatagaaacttagaatattgacaagagtgggttttttgttttgttttattcttttttaaggaagaaaattatatttttgcttatagttacagcccaccatggtcagagaatcattcagagtgtttcacatcatgatatgtcatgaatcagagaaggggggatgcaaagaaggttcctgaagaaatgatatttacattaaagattctgacatgcaatttgaataaggagacaaatgaagaaggaaaaatactgtactgcggtttaataggaaacagttagtgggaatagttagaagtcatcagtaaaaaggcattgttacatgcagttggttcataatttggagataggatcattttaaatagtattgggatccactgcagtgtgacatgaatgtaagcttcctatattggggataaaagaagcagttattgggaaagaaaggtacatccaagcaagtaagaaataaaagcttttgagccttaccattatgacttgataggattaggactaggtgtggggattttgtctcagtgagctgttgagtgcttttgctttgttagccaatatgagggtgtctctaggccagagaacttgtttggaacatgacaaaacacaggctttgtaattttcatattaactatcctgctcaggaagcttacttgtagaagattagctcccccactggtggtattactttaaaaagttctggaaactttgagaagcagaacttagctggaggaagttggtcactggtgatggttcttaggaatatcttgtccctggtcacttcttgcctctctgtgttctctttgtcacgagctctcttgcagcttctaccaccaggacattttgcctatgatcatggaaccaagactcgtggattgcaatctatgcaatcttgagtaaagaaacctttcccccttctacattgttatctccatgcatttttgttggagctatgaaaattaatacatgtgacagacaactcagaaggagaccaacaaacccagaatgatggcaatagtagaaaacactggccagaagtcaagggcagcaattagccactgggagatcagtaaatattgagaaagaggaaagacaacattgaaaaggaagcattgccaagcatggtggcatgaacatttaaaacaagtacacaggaagcagaaccaggcagatctctgtggattccaggccatctaggataacaaattgaaactctatctcaaaacaaacaaacaaaaatccaacaaaaatgacacatccttaaaagtcacacagatttgatgactgagggagggacaagttaagcacaggagcaggaagagcaccctggaagtgaaggagacaccctgcttgggtcagcctaggcaatgttatttcttcaagcctctgataaaaagccaagccaagccaagcctggcctgcagatggtagttaatgaaaaagaaccacttgatgggaaaatggctgcctggaagaaatgagtgaaatcacatggtcctttgtctttgaagatgaccttattatactttagactctaggttgggattagcagccagaaagaagaatctctttctattttctttccctggtggtagctgattagtctgcatagtccttgtagaattgcaatgctttgcaagtccagaaataacatttgttcaagggcccatcaggtgaggactgaaaaccaaacaaacttatttatcctaggcttacagcaagctggtgcatctgaggtgagtgtgctacaagcaattgagggtgattcattttgagaagaaaaaaatgagacagcttaagcaatgtttgttttgactcaggcaaaaagactgtgctttagataccctctctattacacttgtctgggagcatctcacattataggataaggagtgcccagagccagcaaggctggtcaatctacaagtagcccacccccataaatcaagaccatgatctggagcctaagaccctgacattgctgttcaaatggtcttgactctacattcagaacctatatgggactttttctttctcattcctcctaagaacacaatagattcacactaagttgagtgggaaccagatggcagctgtggggcgatggctggggattatacatgcatcctaatttcgtggtgtgacagctaataccttagaacttcccattctggtccctcctcccttcctggtgcttccactgtctcatgtagcttgagacagatataaagagtttctctcctgtaaaaacggctactagttttcaaactgggctttatctcccttgagttttatctccattgcagatgaccctcctggctacattttcaatttattagggctttctaattacaaaaatagcacattatagagaaattttaacacaaaagtataaagtcaccagatataagatgtaaacagagaataaatacaatgttattttgtctcagtactatgtacaagaaacaaaaatagtctaccacaggtgatctaaatagaaggataatttattgtgaaaatgttaagacttgtaaatagaagacttgaaaagtatgacattgatgcattaaagcacataccttccttacagaagacttgaatctaaggttacaaaaaagacaggactcagggtgattctgggtgctatctggtagaaacttgggaagtctcttaggagctctcctaggtaggcatcaactctgacatttgggattcagattcatgggaagcatgagatcacctggcctggctcaaaagccttcttcttagacagggcaccttggcaaggggagaacgtgtctctagaaaaacacatttccattaccagagcccaggggaagggatttgtgaaatgaaaacttaaggtgttcattgtgattttccccacattaccctaccctgacattgatattcagtttatggttgcacgcagcaagctaacctttaagaagcgcggtgttttttttctggatatggatgtcaagacctctatgaacatggaaaattattgtagtgttttagactaactgattttaaatatagtgtggagttggccttgtttacctagactttgctgaccttggcgctttcaacatggcccatgctgcttaaacagaagtgaaaactgacccttgccctaaaccctcctgactcaaaggcagtttcttggaataaataatagttttcaggtggatgaaggaaatgctgattttgtgttccaagtacaggacggggctcaatgtaaaaacttatagcaactagccatttccatggtaacaacttgtttattttgctccaccatgtgtcaggctcattaactactttatttctactccctgaaattctagaagctagtctctgctagcctgcagagacactgaaattgatggttagcaaatgttaaccatttggtcagggtctcggtagggttgagttgagatttgcaatcaaatctgcttgaccacagcaccatgtctcttttcacgttacttgcggttgcttgtagcctccatgcagatgttttgcttgggcctccatcagcacctttctcttaatgtgtgcttacatctagctccaggcttacacctgaaacacctgtgacagcaaaggctggttttgacttatgtatcccatcactatgcttcaaacaaaatagatgttctttgtctcttggcactgtagtctttcctgtacactctctcatgtgtttgtacacatacttgcacactcatattgacctatagtggtctatgctgtgaaatattcctttacactgtgcaaatatatgttgctgtgattggtttaataaagaagtgactggtcaatagctgaacagaacaaagttaggcaggagagccagactaaggatgctgggacgaagaggagcagagtctggattgccaggagacatggagggtgcaagaaatgctggagaacagctaaagccacaagccacgtgataatacatagattaatagaaatgggttgattgaaattgtagagctaattagtaataagcctgagctgtcaaccaagcatttacaatttattttaactctcttatggttatttggaagcttctgccaggacacagaaaaactccactacaggtctaaagttttcttagattacatagacagtcttgagtctttggaaatttcttctattttgtttgagataagattgctctaatctcagcaatgcaggatagcttccccaaccccctgaataacagaaatacaagcttgaaccagcatgccatgcagagctctatttattttcaaatgagcaaacttctaatgctaaccactcaacaattctttcatatagcaattttctgaataaaaatatcaatatcctaaatgccccctttctaataagtcaatgaattgagctagaacattagaagggttgatagttctgatttctgggaggcctgtcttcttcttcttcttcttcttcttcttcttcttcttcttcttcttcttcttcttcttcttcttcttcttcttcttcttctcctcctcctcctcctcctcctcctcctcctcctcctcctcctctcctcctcctccattcaaagggaaaaatggaggaggaatagatctgggagaaaaagcaggtacagggagggaatgggagtagtgaaggtagggaaaactgttattgggatgagagaagaataaaaataaataaatctaaaaagtaactttaagtattccctcaatagttgattctattttgtttaggttccacaggagaacaaactcagctaaagggtcttaaaaaacaaatacttacaagaatagaaaatgggtttcaagaagttagaagtgttctatttgatataagcagaataggttttgtggatattagaaatgagatgggagactttaaggaagaaagatgtactaggagaagccaaagccacagaaagatggaatatgttcattactgcacagtcagatcaaaggtgtgaagagaaaagtaatgtctacagagaagaaactgaggggcaaggacacaaggtgggttgtttgtgagttatccataggaaaggtgtgatcttacatgaacttgaattctaatttacaatgcacccttgtctctcacttgacataatatatttaagatgcaaacttttagtgcatgaggggcaggggaggaggatagggagagggacctgagattgacatgtaaaatgatttcctttctaataaaaagggaaaaaataaataaatttccatagtataaaatttttttgtgcaaaaataaaaatcagaaatgaggactgatttttttagattcaccagaccttaaatttcttatggctggcataatggtttctgggagtatttctttggaattagtttataaggatggacaattgataaatcctgtggaaatgagtttgtatcattgttccaagaagcaacttgttcaattgccttgatttaagaagttttcaattcaggcatatgtttaagttttcaaatctatgtgttaaattcttatttttctgatgtatcttaacttctaaagactgttttcaatttctcctatgtgtaagaactagctaaaagtttattgaaattgtggtatcctaagtctccttcaccacaaaaagtctaaaccacatgtgttgtatgcagctagggactatgcattttgtaaatagagagggtgattcaggtgcaaggctgaaaaactataaaaatattattttaggaaaaatgtcagtaatgttagtcatacatctagatagaaattatctttataacagattaattcaatttactccttataacttatgattgttggatggcctatattcatggatacaatagaaagtagaggaagtcctagaaaggtacatacccaacagggaggttatatggaacctggaatatatatttgagtataaataatttatctgtgttgggatgatcagatagctgtggcacacctaatgagaaagaggtcactattatttctatttcttttatgctgagttgatgcatctagccaaatctctttatattcttctttcataggggcatctctaagtgtccttaactgcagcactttttcctaataaactcactataataaaaaattgctataaatctaatctgaccttctacaaactaaccagtttagattcttaataagatgatgtttaatgctatataccaagtaacaatgtgtaaactaggtcaaataagtccagcctaattcaagatatataaaaccaataaagtgttcaatcagtaatgagtgcatctacaattctgcatgttttaaagcacctttaaattgaaaatttggctcaaatctcttagacctaaaactaagtgtgacaaattataatcattcactattgctctatcccctttcttgagatagggtcttattatgtagcccagactggtcttgaacccacaatcttccttcctcagcctacaaaattccaggatttaagggtgtgctatcacattcaaaaagattacatctttagcccactcagctacttacctgtctcatttcttatcaccttaaatattctttgaaagttgcctattgcaagtacccattcttgggttgcgtcatcccccagaggcttcttacagcatcctaacttattgttcttcctctgttgatgcctctgtattatcttcactctctacccactgtcgttgtggttatgaacaatagtctgccttttctcactctcttaagctatgtgggtacagcaaatttccagctctcgtcaaactcaagcatccacactgtctcatctgtaccagagaagttctgctggcttcccagtttgatgttcagttcccttggaggccacaagctttatagatatggaattgcactgcctgagaaaagcaaaaaacaaacaaacaaacaaacaaacaaaagaaggtagatagattgtgatggttttctctctatggctatctgtaaaggtatcagtgtgctcccaggagggaacagttttgccaccctactgaacacaatgttatttgcccagctcttggctatttgtgagggggagggcatcaggacatcttcccttttcagtagttggtccacagtcttagtatcatactgttgtgtggcctcttctcccagatacttttggatataatattttacagaaattcagctagaaggtggattgggtctcagtgggtagattggctatgagttttctgggtttttccttttcctttttcttttctttttttttttttttttttggtttttcgagacagggtttctctgtgtagctttggagcctatcctggcactcgctctgtagaccaggctggcctcaaactcacagagagctgcctgtctctgcctcccaagtgtcttttttaatttccatacccagagtcttgacttatcttgacttatgggggtttggatcttttccattgggagacaaagaagacataatagagcaattattcaaagggaagttcatgtccatcttatctttagggcttaaaggacctgatgatgacccatctatcattgtccccagtagcctccttcagttagctgtggtggatccccagcttcattgctgtgagggtggtgaagaccacagggtttgggacttttcatattgtctccaggcttcaggatgggatgctttttacccatataaggtcacaaggctggagcttgtggacaaactcaaacaggaacaaggtctccacctctccaactgtctgataagtagttgcacagcttttgaggagcctgtaaggacttgataagggaattgttagtaatctctgccttatgaacatcttttaccttagggaggagaaggggagggctccaaacctaatttcaaatagggtaaaaccttgtcaatgtggggtacacctgatccttagaaaataaaatggtaggaggttggtccaattttcactagcctcaaggacatatttagtgaaaagtttccttcaaggtcctagttatctttctacctatcctgagcattgtggtctataggcataatgttacctttgccagatttttgggaaactgaatgtgaaggcagggccattgtcagaccccaggaagagaggcaatccaaacctaggagttaactctttgaggagtttcttggtgaccactgaggttgtcttcattctagttaggataggcttgcactcatccagcaaaggtatctatgaagactaacaaacacttacacccaagaactgtggatttgatttctgtaaagtctgcttcccaatgttcttcagagtgcttccttaggagtggattccttcgagaacgtttcctatccgtttggagttcacttgtgcaccagtgccacatctaaacacaatgtctttgacaagattgtccagctgaggggtgtgatatctgggtctgagtaactctgcagttttggatggcccccagatggatgaccttctggagtttggcaaccatctgtctacctatagcagcagaaagtacaggtcttccatttggcaagaaccactgtccatttccctcctgtttggcatcttccatttctcccagttgggttcttttggtgtttagtttgggcactggagcaattcaggttcaggcagggaaaccaagaactggagatgccccattggttttagaccaattcctgagacagagagatatgctgagaagcaaacaggaaaggcaaacaggggtggggcaccacacaatcttaaaccagggggttcagtggcatttcacatggattccagacactggaattagggccatgctcagcctttctttcttaagcatcctattcagagagtcataaacagacttactccagagacaacccattttagggtggaggtgtcaacagactctgaggtggcagggttagaggtgggaaaagttcaattgaccctgaaatgtctcaggtgcacactccccaggaaatggacattttctatactttcacacgagtggggactctggacctccagtgtctcagtgtctggggatcttgctggggtctccataatgtttcacagtaacccaccagagatcaccacttatggctgaaaagaaagtctttattacctgccagaagctgcatggggaattgtctaaattacacacccatgagcctggcatccctttgtcttttacacacaaaacatcctggttgtcacatttcagttagtaaggataaagatttagaaaaaaattccattccctgttcagctgtcaatactaaaaagtttagttttataaacttttccctgtttttagtttagttttgttgttatggttcacggattttatttccattagtcaataagaaatgtaagaatacaatgctataaaatttcagtttcgttctgtgacggcaagaatttgagaattaagaaatggagtggttaacaaaaaagaagcagaattacagaaaacaaaaggcaaactcagtacatttggggactttcatggaatatggactaggtctttgatggattaggtctttgttcccattttggaagttgctgggggtctgggtgataggttttaagggcagaatggtgactctaataggacatcggttgtgctaagtaaggtctggggacctgttttaagaggagcatgacagccctttaaaccagagtctcttcaaccttaaatgcaaaaaattctctaggcaaagatatgataagaatattcagatctgactccactccccatggacatttgtgtctacccataaacagtactcatatttggagtgctgaatcaacaaactttagaaagatcctactactttttcatcctctcagtacaaacatatgagtgtggaaagcaaacacgtgttagtaccctcttttgttttggttgtttgtgtttgggtagcctccctaccatgtgtctcttgggaccctactactttctactgtcttcagaaggcagggaaaggaatcagatagtgctccattatgtttccctaagttcctttccaaaaacacatcccccacaaattctctgtccttcttatgcacagtacggaatgcagtcatattctggtatgaccttttcacagatccttggtagacctgtctagagaaaagtggggcatgatagctcacagcaataatcccagccctaggcagaaggatttccacaaattcaagactcgggctacacggtgagttctgggtcagcctgggatacattttgcgaactgatccagcttcactcagctttcagcctctaactgaaactgtgaaataatagaaagatagcccatgtagcactcttttatgtctgcatttctctttgtgtgtgaaaggagccttttgtacattttaccacttttcactttgttccctgtactcattttcatccatcatttttcagctgtccattttctctcacattttggtgaaaaactaaacatcatattaagaaattgaaataggcaaatgtggccgtgtgatcttgcttcctctttgttctggagaaggctcctttcagctagagttgtcaggattgcatttccaagcttagcaaattggagagaatgagaatctgaactttgttttggaaaaacaagaagcagcaacacaggaaaggatgactgggccttggaacagggttaccaaaatctagaggatgcaacaatgtaaatatagattttaaaggctactctgcaacccaaataggatgtgtagcttataatgtttcagtttacataaaaattagcattatcatagcctggtgtcaaaacactgtatgaatcttttttctgttattatgctttaaaaacaaatagactccctcaaatggaaactaaaaggaaaatctgtctcacttacagacatactcagatttggttgttgaattgagaactcaaggacaccgccaaggattcttcctcatcctgccattctctgggagactgttttctcagcctcttcttggccatgagatagttattatcagtccagacacaaccttcagagcttccaattttgagagaaagatgagatttcttcccctttcttgtttttggccacgaggtgagctgcactgggtgctcctgcttcaggtgttccctcagctcatccccaaaaggactggagccactggctaggaccaaagctccagttctctttccaaaatgaggggtgcaaataaaaccaccgacctcccccactccccaaggatagtgaggcctcccatgcaggatcatcaaagtctgtcacaccatttgggggagggcctaggccctcctccatctaactgggctgagagaatatccatccatagggaatgagctcccaaagtccatttgtgtactagggataaatactggttccactgttcgaggtcccatatactttcctggcctcctaactggcacccacattcagagggtttgtttcggtccaatgctggttccccagctttccaacctgggtctctgtgctctcattaggccacgtcagctgtttctgtaggtttctccaacaaggtcttgactgcttgctcattcccactccctctcaacaactggatttcaggaattcagctcagtgcttagctgtgggtatctgtttatgcttccatcagctactggatgaaggctctaggatggcatataaggtagtcatcagtctcattataggggatgggcatcaaaggtagcctctccattactgcctagattcttagttgggatcatctttgtggatctctgaacatttccttagtgccagatttctctttaaatctatattgattccctctattaaggtatctcttttcttgctctcctctattcctccatcccctcaatcttagaatgaatgtcaagaagctaactgaactcaggtgaatcatccagaaagttgactgcaatgttaagaaataataaagaaaatattaagattagaaatgaatacattttatttctttaatccagagaaaagcaatggacagtagtccattagacatacacagtgtcattgttttttgctctagaatccatactgcttggggactgtgtctggtttaattccttccttgaaacacttgtgaaactgtacctttttctggaagttttgaaaacttacctcatcagatgctgtcagaacaatttccttcatgattacttttgtttgagacagtcttactatgtattccaggctggcatggaactcactgtgtagaccagactggccttgaacatagagattaacctatgtctccttaccagttctgagaccaaaggtatgtagtaccagccaggctccttcattgtctgggagaaaaatgtctttatgtatttctttgctatcatttcaagggttatatgggagaacacaatatatttacttagtgtaagaactgagctgctcagggcaagacctgaacagtaaataaattcagactttaatgtgtgtgctgttttttttccatttcatttaccagttgatggcccatctattcccccaaagagaattccttatttccaagaattattaactaaagtggtaggataccaaatgtcccacagttagcaatcaccatctgggaactacatgctgattaaaagtcagtgtagaaatgactctgtatctggctgtttacagtgttaatggttactatacatgacaactgacagaatatcaactataactaagctggaggcattccaaatgctatattgttaggagactagatcagaaggaaccaggcaaaatcaattttcagttctgatgacatcttagtcagtgttccagtgctatgaagagacaccatgacaaaagaaaacatttaactgggacttgcttacagtttcagagatttagtcattatcaacatgccagggaacatggaggcatgcaagcaggcattggagaagtagctaagagcaggcagagactctgggatgggcatcagcttttgaaacctcaaaacccacccccagtgacaaactttctccaacaatgccacacctcataatcttttcaaatagtgccacaccccagggactaagtgttcgaatctatggaagccattctcattcaaaccaccacagatgagaaagaggaacttgaggatttactccactaggataacaaagaaagaaaaaactggttgaaaatgcatttgtgtgctgtaagtgtaggaggacttcttagctgaagatcataaaataataataaacaaataaattaaagatcatggagttattgggggtgattttgagtaaaactggactgaatgataatggtcttcatgtggtagcttttgatctttgtaaacaaaacgacccatagcaaaaatggaactggtgtctatgttcagagacaggagatccattttaaggtgttttgcttattatgtgggatatactctcatgcattctcttcttgcttcactgtttgtaacatttattaaagcaatgcagcctcctgaagatagaaaccacaccttgatcaccaagcttgggtgatcaagaacctgagaataggtaacacaaggacttacaataaaaacatacaccactcttctataaacaaaacaacaaagacaaaatagcagtaaaatgactcctagtgctattttcataaaccagtgccttgcttagccatcatcagagatgcttcctcctgcagaagacaggaacaaatgcagaaatccacaatcagacaatatgcagagtgtgagaccttggaacactcagcctgaaatggtatggctccatcaactccctggcatcaagaagaactcagggaactccatggaagaggtggcaaaaagaatataagcatcagaggggatggaggacactaagaaaacaaggccctctaaatgacaatgaccaaagcttatgtgaactcacacagactgagtcagcatgcacaggacctacatgagtctacactgcttcaagttcagtgtttttgtgggatttatgaggtgtaaatgagtgaaactctgtttcttgggccttctcttgggctgttttccttttgtttgttagttttcttccatcctccaattctagtgtgttcatttattttattttattattattccttagaaacctgtttattttataatgagagtaagaaagggagtagaactggatgggagatgaggtaaggagaaactgagggaatcagagggagagaaaaccataataaggacatgttatgtgagaaaaaaatctattttctactaaaggggaatatcatttaatgcaaacaacaaagcaaaacaatgcagcacgagaattaccactcaatactaagcagcgattcagtctgaaaaatatcaccccaatatcctttgagaaatggcattcttatgttaaaattttatttctaaacagttctgaattaaagaacatagatttacctcatccctgcttaggagacaccaagtcattcacacttcaccaagtaactaggatcattttagtgcctcctactctagctgtaggcacagtgcctaggattaaatcgtctctgcaatgatacagaatggtagtaactagggggagtagagaggagaaatcagtcagagactcaaagttctcataaaccagctttttaattgatgcaaaccttctgctctgggatgatagaaaatgggggtaaaatgggagtggaagaggctaggcactgggaaggagccagacttaagagaatggatgatgtaagtggaaagactgtcactggatcctcttcacacaaatgattgtcccaatagaacaatggattaatcagtgtgctatgcacatctcacaactgatagctatccttgtttgcccctttctctctaagaagagaagtatgtggagttaaacaagacatcagcttcctaagaaagttcagctggggttggctccagccaagaagggtaatgagagaacagacaggtcattagggcacaagccaagcaacacaagtaagtaacacaatagacgtggtttgagggaaggctgttgctgactagaaaggcttttgaaaagctacaagaaaatagaaatttctaaactgtctgtcatggtgacgacatgttttagaagaatttttaataatagcctttttaaatgttaaaaacataagaaaatacgaactcacaattttagcactttcaaatccaactacaaacagaagaatagacagtatttatttctctgaaatgttatttggttgaaggcaagaccagaaagtttattgttctgaaaatttgtaagccccaggactatctattagtatagaattaattgagagaaccaaaattagaagaaatatttgaaaaaaattcttttgaaacccacttgagagctgacagaagtagtctcagacaggtacccaaattatatataagctagttgagctttttaacaccaaagtcaatcaatatcttctctgtgagagagacttggatagaaatcaacatgacacaaagctaatattcagccagagttgggaaccactgctctagatccttgctttttacagtgtgctccaagcctgactagcagtagtgttgcctggaaatgtagttgagatatcttgtcatttcaagctcttctctagacccactgaatcagaacctgaaatttagatgattcctgtgcctattaagtttgagaattacagattgagagaatacttacactaacaaatactgaaactcacaactttttaaatgatcccttcttctgtgattgtgtgctatagcacaatacttcaaaaggttcggacagatatacctaccttggctcatgacttctgatttcactaactgttctgagttaatgcctcattcttcagaacaaaagcgcagttccattcttgatcctgattttgagtgtcattgaccctgccctaggaaagctgaacattaccaggataatgcttataatctagtgtcctttgataaccagatactggaaattgttgtttctgcattcttgggtgtcagcaatcaccattaaatgttgtgccttagtttttctttacccccacccctggccacacacactttaggtttataatgctatgttgcatcagaaccagctctgactttagcagaatgattatgtgacatttggctttctatgaaaagccaatcctttgcttgagaagttcataggattctgaatacatgtaaaactgacttctctaattatccaactagttcaggacttcattagctcatttccccaccagactcctgggataaacttttctccattaaaaagacttggacagcagaatccctcctccactccactgagatgatccccacaacagcaatttttgagtacctgggtctgaaactagacttcataaagtccctgatctggtcttcccttctttcttacagtaggaagcttcatgtcttatgtccagatgaactctaacattatccatggggcatagattcaccacatggtcatcccaggaccaaaaagctcatgagaaaataaatccagaagatctcaaagtatagggaaaaccaaataaatacaagaaagaccattaccgatggaaaaagcttgttcactatattatttgttttgctgatcatgacaacttacttctattcctaccatacttatataacatattctgaggtgtaagataaatgtacccccaaacatagaggtgactttcctacaacttacctgggtggtcatagattggatttagaaatatatacaactctggctcagtaaggaattcatttcttgaaaggagaatgtgaaattccctaaagaaaaaaataggtaaacctcctaaaggaattcaagtcactggtccaagacatgtagttgctttagaatcagggacttttgaattgaacagctgtaacccatttgggcagttttgcaaaacagaaagttggcagaccagacattattttcagacattcaaacataagatatttggggccaaggcttgtgattaagaaatcaaatgttttcttttcccccttccaacctgttttcaaaatgtggaaaattatgtgatttttcttctctgaatttctatttgtggttattgggaattgactgtctcctcagccagactagattcagccactggagattgatttgattcaattcagtacattccaatccaatccaatccaactcagcctcatccgcctttctttgggggagacttatataaaaataacaaactccagtgccttggggctgacatacctgttggctgaagctctgcttatcaaatatcttgacttttgtacaatatcactgctttttgtttccaccactgtcttatggttctgattttcatcctttcctgagtcttggattcttctttttctgtctgagataatatacagtatggatactctagtctctttgggcaggatccacttcttttgtgcctaattctaaccatcatttctgcatcctagcttttgtgggaattcttctcctggctcctctccacattatactttacttcattctttcatgtctcattttcttctcccacagcttggcctgacaaggtccaggtcctctccaaaggtttcctttcacatacacatgctgagatatgcatgaacatctggcttgaactttttgttctacttcagttcctcgtgaaatatggggagatgagagacaaagagaagagaaagagaacaagatgaatgagaataacatcatagaaatgccttctcatctagaaaatattgagaacatgcttggactccacttgaaaagttgggtgtctggactctaacacaattctttctgttctacctgcactcaaccacagttctaaatggcctggcaacagcaagctggtgaagagcatgggtggggagtggctagtgaaaattggccgctattgcccccacctgtgaggaacaaaatcgtggatcccaaaggtctatttattaggtaaatttccaggatgccttcagtgatatctaaagtactaaaatgtaataagtctttctctgtcccaccaactcccaaataatgacatggagacttcttattaattatgaaagctcagtccacagctcaggcttgttcccaagtagctgttataacttaaataaacccatttatattaatctatgttgtatcacatggcttatggcatcacgtcttctctgcacatcctgcttgctctgtgtctcctgacttctggatgcctctgtcctctcttcttttctggaaggcctgtctatttctgctgcctagctattggccattcagctttttttttttttttttgcatagtcgatcctgaaaatctactacttatttttttttttgcgattttttttatttgagttagaaacaagattgttttacatgtcaaccccagttccctttccctcccctcctcccctaccactgccccaactaaaaccctacctatcacatatcctttttgctccccagggagggtgaggccttccatagggtgtcatcagagtctatcctatcttttggatagggcctatgtccaccccgtgtgtcttggctgagggaggattcctctatatggaatgggctcccaaagtccacacctatgctagggataagcactgatctactacagaagacctcatagatttccgaggtctcctcactgaaacccatgttcctggggtctagatctttagggagacactgtaaccacaactccaaaggctggctacaggtgtgcctgaccacgccctggcaggcatgctctggcttgcgtttggctggtgtttatctgaataaagatatatatatatatatatatatatatattatatatatatatatggtttttcgagacagggtttccctgtggctttggaggctgtcctggaactagttcttgtagacaggctggtctcgaactcacagagatccgcctgcctctgcctcccgagtgctgggattagaggtgtgtgccaccaccgcccggtgaaaatgcactgtcttttcggtgatgaagagtcacttcccatccttcccataaatcctcttttgcatactgctttggccaccgccactggttcttgtcatccttcccctactagaattctgacattctgatgaaggaattctggacttggtaccatattaaatgttactaaaaaacccactcctcactgatgattgttaactgtctgtcatagtaatatagtgcttagattaatttaggaacccaaaagaaagaaaataacttcttaagatcattttagaagacacttttcttgtgacaaggcttctaaataaaatcctcccttttttgttattgttctgtttttgtttggctttttggtttttttgttgattgtttgtttgactttctgtgatgtatacttcagtctttgaaaacaaatacctaaagcacaatttcctaaactcattgtggtttaatgagagataggtgaccattgctgagcccatctctaaaacatatgtgtcctttcatctctgaccccattcccaaaagatagcaaagatcttctcccccaatcttccttctcctaattcatcccattatctctgtgtccaacaccaataggcacaccctgccaaaccaagagttgctcctttgagggcaactaacaagtaggctcaaggccgatgcaaacttctactgctcctgagctccatttatcccagtctcatcctcagctctataacaggaaaactgctgcaatatccctttccttttgacccaataccaaacagataacaaagacttctcacaaccttcctttccataattcatccctgtaccagccttcaagatcatcaggcattccttttgaacacaccagcttatcaggcctgtaaaacaggcaacacccagctatcacactctctgaaaatccaaagaggaaaaagaaaccaaggaacaaaagaccctccaaacaaagacaaacctagagatcattacctagacctataattacccccaaatccatttgcctaaacaccactgtaaaaacacaatcaataacagccaggacaatatgtctccactagaggccagccatcctaccacagcaaaccccgagcattccagcacagtagaagcataagaataagaccttcaaaggaactatatgaagattatagaggtccttaagaggaaatgaataaatcacttaagaaagtcaatgaacacaaacagtagaaagaaactaataaaagtgcaagacctgaaaatgaaaatggaagaaataaagaaaacacaaatggagggaattctggaaatgaaaaacttaggaatttgaacaggaactaaaaggcaagcttcaccagcataaaataaaagacgggagagagaatctcaggcattgaagatatgttagaagaaatagatatatccatcagtcaaagaaaatgttaaatctaagaaactactgacacaaaacatccaggaaatctgggacagcatgaaaatatcaaagctgagaataatgggaatagaagaaggagaattaaaagtcaaagtactaggaaacactttcaacaaaaatcatggaaaaatgttttcttactttcttttatgttttgccaaatgtacaaaacaaagaaagaatactaaaatctgcaagggtaaaaagacaaagaatcatataaaggtagacttattagaattacacctgactgcttagtggagactataaaagccagaagagcctggacaaatgtcctgcagactctaaaaagccacagatgccagcctaggctaccatatccagaaaaactttcaatcaccagaaatggagaaaacaagatattccatgagaaaatcaaatatatatatatatatatatataatatatatatatccacaaatccagccctacagaacatactagaaggaaaatgacccaaggagaaggttaactaagcccatgaaaacacaggaaataaataatcccacacaagcaagatcaaaagaagagaaatacacacacacacacacacacacacacacacacacacacaaacacacacaaaccaccaccaccaacaacaacaaataacagtcataggaatcaataatcattggtatgatatctctcaatatcaatggtctcaattccccaataaaactacacagactaacagaatggctgcataaacaggatccatccttctgctgcatccaaaaaaacacacttcaacatcaaagatagacagtatcttgggataaaagtttggaaaaagatattctaagcaaatggaccccataatcacatggtatagctattttaatatctaacaaaatagatttcaaaccaaaactaatcaaaagggaaggacacttcatactcatcaaaggaaaagtccaccaagatcacattcaattattaacacacatatcccaaacacaaggaccataattgaccacatactcataagcaaagaaatctctgggaaaccagcatggaactgatccagaccctataaatgtgagtgtcagggaggaggtctcagaaatatatggggcctcttgtactagatcagtacttatccccaacataggaatggactttgggatcccatttcccatagagggatattctatcagcctcagcctagacacactgggtagggcctaggccctatcccaaaggatatgacagactctgaagacccccatggaaagtctcactctccctggggagcagaaatggtattggataagtagggtgttagtggggggcaggggaggaggggatggagagggaaccaggattgacatgtaaaacaatcttgtttctaatttaaattaaaaaaaaaacagatacaagaaaagggaaataactctctgaacccaccacagactaaaggtaggtaacaacaacagacacaatagaaagctaataattcatggaaatggaacaactctctactgaatgaaaaacaactcaagatagaaatgaagaaagaaattaaatactttctagaattcaatgaaaatgaatatacagcacagtcaaatttatggcacacaatgaaagtggtgctaagagtaaagttcatagcatgaagtgcctacataaaaaatggagagatctcatactatcaacttagcaacatacatgaaagttctagaacaaaaagaagtaaacacacccaagaggaatggaatgcaataaataatcaaactgagggctgaaatcaataaaatagaaacaaagagaacaatacaaagaatcaatggaacaaagaattggttcattgagaaattcaacaagatagacaaacccttatccaaactaactaaaaggtagagaaagaatatccaaattaacaaaacagaaatgaaaatggggacataagaacagataccaagggaatacaggtaagtaagtataaggacatactttggattatttcatatttactttttccctttttattagaaagaaaattattttacatgtcaatcccaggtccctctccctcccctcctcccctgacaccccccccaactaatgccctacccatcccataacctttctgcttaaggacatacttttaaaacctatacttcaccaaattggaaaatctaaaagaaatggaaattttccttgatgggtatcatttaccaaagttaaatcaagatcagataaacaatttaaataggcctataacttctagtgaaacggaagcagtcattaaaagtattccaaccaatgaaagctcaaggccagatagttttagcacagaattcactacacttttaaagaagagttaatgccaatattcctgaaatcattccaaaaaatagaaatggaagaaacattacccagtacattttatgagcccatggttaccctgatacccaaaccacatgaagattcaacgaagaaagagaattatagaccaatttcccttatgaacatatgtgagaaaatacgcaataaaatacttgccagctgaatccaagaactcatcaaaaagatcatccaccaagatcaagtaggcttcatcctaaagatgcagggatggttcaacatacaaaaaacaataaatgtaatacaccatataaacaaactgaaaggaaaaaatacacatgatcatctcattagatgcagaaaaggcctttgacaaaaactgaaacctcttcattataaacgtcctagagagactagggacaaaagggatacacttaaatacaataaaggcaaattacaacaaaccaatattcaacatcaaattaaatggagagaaactcaaagcaattatactaaactagcgacaaatcaaggttgtccactttctccatatctactaaatacaatacttagagctttagctagagcaattaagacagctgaagaagttcaagtagatacaaattggaaagcaagaagtcaaagtactattatttgcagatgatatgatagcatacataagttatctttaaaattctaccagggagctcctacagttgataaatacttgccacaaactagctggatacaaaattaactcataaaaatcagtaaccctcttatatacaaataacaaatgggctgaaaaagaaagcagggatacaatgactttcacaatagcctcaaatcatataaaatatcttgttgtaactaaccaagctagtgaaagatttgtatgataaaaaaagtttcaagtcactgagaagatattagagggtggaaagatctcccatcttcatgggctggtaggattaacacagaaaaagaaaatgcccatcttaccaaagcaatcaatagattcaatgtaatcccatcaattacaacacaattcttcacagaccctgaaaggacaattctcaacttcatatgaaaaaacaaaaataaacaaacaaacaaaaaaacagcatagctaaaacaatcctgaacaatggaagaactgctggcggtctcaccattcccaatttcaagctgtactaccaggctatagtaacaaataccacatggtactggcataaatacagacatgttcatcagtggaatcaagttgaagacacagacataaatccacacacatgtgattttttttatttaaaaaaacgagccagaaatacacaccagaaaaaagacagcatcatcaataaacagttctggtcaaacaagaagtcttcgtgtagaagaatgcaagtagattcacacttatcaccttgaacaaaactcaagtctcagtggatcaaagacctcaacataaaaccagttatactgaagctgatagaagagaaagtggggattgtccttgaaggtgttgacacaggagataactttctgaacagaacccttacagtgcaggcactaagataaataattaataaatgggactttatgaaactgaaaagcttctgtaaggcaaagaacattgtcaaccagacaaagtggcagtctacagattaggaaacaatttttaccaactccgtatctaatagaggagtaatatccaaaatatataaagaactcaagaaataattcaatttgaaaaatgaggtgcagataaaaatagaaaattctcaataaagcaatctcaaatgcctgagaaacacttaaagaaatgttaaaacatccttagccagcaggaaaacacaaatcaaaatgactttgatattctgtcttatatctgtcagaatggctaaaatcagtaaaatacgtgacaactcatgctggtgaggatgtggagcaaggggaacacttctccactgctggtgggagtaaaaaacttgcacagccactctggaattcaatatgatggttcctcagaaaactggaaatcaatagacctcaatgaccccatcctaccgcaaggacacttgttcaaccacgttcactacagctttattcctaatagccagaaagtggaaacaacctagatggccctccatagaagaataaagaaaatgtggtacatttacacaacagggtattactcagctattaagaaaatgacaacacaaatttttcaggcaaatagatggaactagaaaaaatcatgctgagtgagggaaatcagacccagaaagataaatatagtatgtatttgcttctaagtagatatagctgtttgataaatgataactaaactacaatccacagaaccagagaggttagataaagaggcagagaccagacaggatgcatgcatctccctgggtaaggtaaatggaatagattttatgggtgagacagttggaattagggggttttgggggttggtgtggaaactagtctagtggaaactctaggaatatatgaagatgatgccaatatgggctgttattcatagaggatgcagagtctcaactggccatctcttgtgggcagacaaatcttccagtggtaggactatgttgtattcaattgagttgttggccaagtgggtcccatggaaatttccaaacaacccagacaatggattgctctccacaaatccacagtggtgtcccattgctacaggcaacacccacataacccattcaataagaagtagagctggtgcctacatggaaccttcattcctacattctagtctcttttgttcaggaaggtactatgcaggttaacaaaagagaaatatgggcattaaccctgccacaaacatatgacacacaatctttcctgcatgaaaaatattccagaacttgtgggagtagccaaccaatatctgatttgactcaaggcccactccataagagagaactcatgtccaacactgcttgtataaccaagaaccagagactagataagccctgagacccagagtaaacctaaacactactggtctgaaaaaaaataataaatgactcctaatgatattctactatttttgtagatcagtgtcttatctagtcagcatcagcaaagtttcctcctgcagcagatggaagcagatatagagactcagagccagacattacatggagacagagtttaaatggaaggtctccatcaaatctctccccttcagaactcagggaattcctttgaagggaggtgaaaagattgtaaggaccagagggacaccaggagaaccctctgaatcaactaagcaaggcacatacatatatactcacagtaactgaagcaacaatcacagggcctacatgggtccacaccatgccctctgtgtttatattctaggtattaactcagtatttttacataacccctgagtgtgagaatgagtgggtctctgaatcttgtggctcttctctttctgttgggttactctgtccaatttcaatacgataattttctttcatcttattatattttattttgtcaggtttggttgttattgcttgtaagcctgttattttctgatgagagtcagaaaacgagtggatcctcttgggtgggtgggaggagtacattaagtggaaattataatcaggatatattctatgagaaaataatctattttcaatgaaagaacaaaatctgagtgtatgctcactctgaccaacactttgactaaaatctggaaaggggtagcagtttccaaaggaacatttgtcaaaaaagggctggacagggattctggtcagaccaagagagtatttgctaatgatgtcatcatcaccctccacctcacattactatttactaccataaccagttatttcttttagagaaaatggacaaccaactttgaccgactgtcagatgggcttcctgcacagatacatttaagagcagagggagagctaagaagttccttcatggtagattgcctaatttgtatgaggctatggctccattccccagcatggaagggtggtgatgtgggaggagaaatgaacagattgacaggcttggtaagagagagtggcacttggcctgtttgagagtaaaatttaacctggtatctctagcaacatcatatatagatggtactttcttactggagggataaacaactcctccataacttatcatgagctttatcagccatttaaaaatattttccctagttgagggtaaagcttcataggaaagtgttttagatatgcacaggggtcagagaccaaataccccgacaaatggccttcttaaacctcaaaggcacttgcatcctttataacaactgcaccttctctgtgctcacttaacggatatgtaacacacacacacacacacacacacacacacacacgtatgcacacacgcacgcacacattacatgtccattaagcacacacacacatatatataaatacatatatatgcatacatatgaatatataatgaatatatttagccattaagaacacacacacagtgtgtgtgtgtgtgtgtgtgtgtgtgtgtgtgtgtgtgtaccatacaattcttgtgccaagagcacaaagacatcatgtaatagtttattttctataagtcacgtctttggaaataaggcaagaactaggatatgtcatttggtaatgtcccttcatgtacattagaaagcacacaaaattcatctctagttacctgtcttctataataatattttctggtcgttattatataattgactcattcaaaaaataagagaaaactaaagtcattaggatagtgcatagaatttgacatgacaaccgatccttgtagccaattgtaggctcagggattcaataaagatgggtattactcagggagattcacaaaggacatcagagaattcctatggacatataaattcccatcttatataaatcagcaagtcattgcaccttgaattgctttttgtgatgaactgttaaactgcttgtgaagaaatacattttttttggtttttttttggtttttcaagacacggtttctctgtgtagctttggagcctatcctggcactctctctggagaccaggctggcctcgaactcatagagatctgcctgcctctgcctcccgagtgctgggaataaaggcatgtgccaccagtgcccaacaaagaaatacatttttattctcctaaatttgatgcatgcagctttcatcatttcatattagcatgctactcctcttaccaatgtccattattttataaacaaaattcattttaccttcaacataattttattataaaaagaactattatcattgctactgaaggggccagctccccatttcggcagccataacagccaatcacgtgcttgccataaccttgccttggtcacttagaggtctgatgcctgcctcgtggcaaggaaccaatcagaagttagctggtggtgctatgctttatggctctgggtgtactttacggacattgcacacagcaatgacacacagagcatagcaaccaccctgggagggcctatgggccataacaaccagttgaccagtcaacacagagcaagccctccaagcctggaggcacaccaatcgtgagcctctgtgtacccctagacactccccttacgctgtcctacaagatctctcgggagcccctaggagttgtctttgctagccatccgccatggcgggtgggtgaaataccccagctaacatggggttagctcgttaaaaaaaacaacaaacaataaagcctcatgcagtttgcagcaagctctcgaattcacctggtgattggggtgactgcggtcgtggcctgggaccccggatacttgagttttccgggggtctaactctacaagaattagggtcatgttcaggtagagaaggcaatgctaactcccacatccttcacacttatgtcctcacttatcttcaattctaccttgcagtggaattgatcaatttatcaacaacaaaaggaaaatatccagtaaatttgaattccaggaaaataattttaacaagtattccatgcaatatattacatgttcaaaaatctatttgttatttacatgaagttcaaattttactggactatcccttttatttttctaaatctaacatttagaaaatatatatatatatacatatatatatatataatatatatatatatatatatatatataatgaaaccaggcttatattgactgtcgggggggccaggaaacttccattaggtaatgtccacggcttcagtaaccaggatctctggtctgcattgaattggggatgctagctgatttgctattgaatagcatggcctcggtggagaatgtcccctaagtttgcatctctacagaaataaacattttcaataggcctgcaccagggcggagggtgaggtgtgctggacaagtgaggacagatagagttaggagctatcaggcaaaagggatccaccggaggagagacaaatggcctcatggccagggaagcatggttaggaaacagccaggaagatgccgaataaagaagagactccagttttgcagcatggaacagagagctctctaaagatgacaagatgcctgtgtttagtctttatcaccattgagttgctaggagtttccatgttcatgctcccccactcaggccaaacctcatggctacctggcttggggctgagacatgccgggccccaacaactgacataccccaacatgaccaaatacaataaatagtttatcaacaaggatgttgaattaaattgagccctttggctcaaagggctcaaaaaagagacagactgaatgtctaaagacatgcccttctcagcattgttaataactgtattatccttcagtgtctttaaggatgacttttcacataaaatataaagaaagttttttttttttatttttagtgttcagagtgatgtaagaagcacagaaatgattccttgtagtcaaaattccactttctgcatccctctggataaaacaagctgtgtgcaacaatccctttacattgctgcaccatacacatattacaactgccattgctgactatatttccccaactcctcatcatagcagcttaaaagtatcttataggattaaccagaaaccagtccaattctgttatttaggcagctgaagtcacaaatccaggcatcaatacacagtgtaacagtgtccagaagcccactcatgttaatggtcatcggcatgatctgtgggtggcccagcctagttttaagttaggggaaggagtcaggtagacccattgtctgtcagaatcaggtggagaatggttttactagttagagttcttcatgaagtgtctgactgaaatatcatttaaaaggaagtcttactcagttcatgcgtggtgacaggatttcacaatagctgtttgctttttcattttcccagaataaatgaagattatttctgagtgtaaatataaatgtttgttcacttacatgcttgccaaaaagacagtcaaaaccctaacaaaatcaagaaaaaataaaaagcaggcgaacaacacattttttttttcagggtagataacagtagcaacaacaatgatgataatttgatattagtagttagtatgctcagaatttcaaatgattagctgttgtgtttgaaaataactgtaaagagacaaatgtggtatgtaaaaaatattttattgctgaagtttaggctgtatccatctggagaataaagagattagcgattgtaattgaaaccagcagtaagttatccagggcctttatatccaatttctcattttgtaatgatgtggctctaattctgtagatgaattaggtcacatctacacagtagaaaaacatccagttgaaaaattgttaatttagccaaatgatatttaaaagcacccaatggtgccaaaattttaatggattcatttttattttgtggccttgttccatattgttgatcaactatttccccaatgatcaaacatatttggctcttcctatggctaaaaatcaccttttcatccggaatacccatttgcatcatgcaaagatatcatttgatgatgatggttttatctttctgaagtatattagtagattagtatggtagaatgttgagcccatctatgtcaatgagaaaatgttaagccaagaaacttttcaaagttgggccctaaggaaaatgtgcacattgttttcaagtgaataaaagtattacattcatattagcaaaactaaaggtgaattttgaggataatactgtaatattccttaagagtacatatatgaagaatatggataaagtctagtttactgtaacttaagaaataaagaagatcctacaagaaaatctctcagcacaatacttgtattaaggtaaagttttatgctctaaaaacatgcatgtgcagccaaaacaatttattactagggtgggttgtggacttagtggctgtactcctaagggaaaagaataaagcataagattaatcttttaaaagtttacttagaaacaaaatactactggccttcaagatatcatgcactagtctcccctctgaacagtttttacagacaacttataacctccctaaattataggttgtgtagagaaagaaatagggggttattgtataataaagaagctgacagatctttaactctaactggactggttgttgctactgtaatttatgcatagatactgattctaattaagtaatagcagaggttgcctttgaatttatgaggctataatcagctcccttgtgctcaataaatgccacagctacagtctgtggtgttaatttcacactacagtgggaactagtgcttgttgccaaatatactcataagtcacaggcaatttggattattactgtagtgtgtgctgcattgagaaatgaacgaatcatgaccactttctgaagtcattattgagtgtttgtgtatgagaactcttctgacattgatgaggcatagtgtggtagctggtctttttccccaaatcaatatcggataaaacatatatgcttaaatttgaggttttccttatatactacctcccatgtgttgttccttgaatgatggtgcctgtaggatcatttcagtatggacatttcatgagtcaacatgagattttattaattccaccagcttgctggaaaatgtgttgtacacctttcttatttcctgaacttaggcatctactgaggtgctcacactgatgtttactactagagtcacttcctcagaatatcacacatgcaaacatgaacaaacaaactcaaacaaacagagaaactattttacctttgacctttgtctcagaggagttacttttagcagtcgggttttgtgaaaatccacttaggaccaaatagtattccacattttatcttacaccgactggcaaagcagcttctttcctccagtggggattacattcccacagcagctatgggtttaaggggtcttcatgagtaagaaggcaaattttatcaattccatggacagcatgctctgttagagatcagagatttttgtcgtgagtccatttccatcatctcctaaggaacccactaggatctggtgtgattaaaacaacataataagaaaattgtgttttctttttcaaagcaagcacaaagggcagatgactccttgtgtgatgtgaaacctgacaaaatcaagatgccaagagagatggaaagaaatcaaggagccactgcctcattacacacctttcaaatgaagtgacagaaaatatcagacatttcatgtattgctctccatgttctcttgagacaaaactatatacctgagatatctccaagctagaactgaagcccctcttttggtaagaggttggaaacatgtgatgggagttgtccttctgtgtatatgtttgtctaattggttgataaataaagtactgctggccaatagggaagcaagttaggggggactaggagtcgaggaagattctgggaaatgtagtaaagagaagtcttgtgaccggcatcttcgataagtctttataaaatatatggattaatggttatggttgataattaagacagagctagcagataagaaatcatagtcatttggccagcagcattgtacctaatataagtctctgtgtgttattttgggggccctaaagccatggcagaacccaggcagctggtggaaagatttaccgttacaaacatgtatatggagtacacatacatgtatgcatgtgcactttcatatgcatgtggaggaagttgggggcaacgttggaagttgtttttgctctgatcctctttagtaacacttcagggacagatattatgatgtcaaagtgacatttaactacacattttcttcacccaactttcaacacaaaaggcaagtcttctattttcatacagatgcataaacaaaaatcaagatagcagcattttaggcgggaggcccaggaagtgaatagatgagttgtattacatagttgtgctgatcagtacagatgcacagcctcacaccttggaagaaagatggagacctttaacaaatcttgctgacagagtagtctgaagtcacactctatatgtgatggccacagaggtgcatcagacagttctcatctcaaaaaaaatgctgatgagcatcattgttagctggtagcttctgcagctgcatctgccaccatcccaatgttcatgacagagccctagcattcccaggcatctctgagattgactacgctgagggcatcaagagaaccacatgaggcctgtaacttcttctcaggaattcctcagctgcttattctattctcctcacttgcttctaacattcatgaaagccagtcactcaccaccatcaaaatgttctttcttcctttgggttcttttgccacgtcatctccagatactgtcaacacccgctggaagctaagaccttcctctgattgacagccagtggtataaagcaggaaagcttccttgggtgctgcagagatgccttatcaagtacaggtgcttgtcacaggctgatgacctttgtccatccccaaaacctacatggtagaagaaaaggaccagctcccaaaagttgtcttcttacctccatagtcatgatagggcacacatgcgcatatgaatcttgaaattcacaggtaaatggatggactagaagaaaccattttgagtgaggtaacccagtcacaaaaagacaaacatggcatgtactcactcatatgtgtattttagacatagagtaaaggattaccagtctacaatccacactgccagagaagctagtaaacaaggaggaccctaagagagacatacatggtcccctggagaaggggaaaggaacaagatctcctgagcaaattgggagcatgggaggaggggagaggtaactaggagaatgagaaggggagaaggacaggggtaaggaagacatgatggggcagggaggttgagttggggaaagaacagaagagagcaagataagagataatataatagagagagacattataggtttaaagagaaattaggcactagggaaatgtctggagatctacaaagatgacaccaactaacaatctaagcaacagaggagaggctaccttaaatgccctcttctgataatgagattgatgactaattcatatgccatcgtatagccttcatccagcagctggtgaaagtagaagcagacacccacagctaaacactgaactgaactgaaatccagttgcagagaaggaggacagatgagcagaggggtccataccaggctgatgaaacccacagaaacagctgacctgaacaagggagagctcttggcccccagactgatacccaggaaattagcatgggactgatccagaccccctgaatgtgggtgtcagtgaggagaccttagaaatctatgggaattgtagtggatcagtacttatccctagcataagaatggactatggtagttcatcccaaatggagggatactccctgagcctagacacaagggggttggcctaggccctaccccaaaggatatgacagactttgaagaccccctaaggagggccttaccctccctggggagcagaaagggtatgggataagtagggtatctgttgggggggcatgggaggaagggagggagagggacctgggtttaacatgtaaaataatcttcattctaattaaaataaaaaaacagaactagttgaccaacataaaataaataaataaataaataaataaattcaattaagatgcaaaagaaaagaaaaacaagtttctcttgcgagagccaggtgcttattgcttcagctctgtgtcatgtagctgtcactgttcctatttggatctcccacagcagtataaactcccccagaggaactgtgtttccatttgtctcagatatctccggccatccttgatcctttgtgaacagtgagatagcaatggaaggtgggagagggtgacctccagagacagctttcccctgctcagtctggccatccctagtccattgttcctcatttggccttaccatatctatcctttcttttcctccccttcttctcactctccctcccatcgtctcttcctttctgctctgtttcttcattgaaaaactgttcatttattatacccaaagtgttgaaattgtcttgtgattttggatctttgcagtgtctttccaggcaacagctggctgctcctgtccctccctgatgcttgacagcagctagccttcaagagtgatctcagactctgggcactgccctagaaggtttttgttttagttttattaaaaagaaagaaagaagaaaaaatcattctgaataatacacattccctaatgaaagggtaaaaaaaagtttaacaatccagttgcagctatttctatgcacagctattctgatggcaatcaacagtgctaccagagcctttgagcaggctattgttttatgtttctcaaacagtataatagcctgggagatgtggaaagacatttattttcttattaaaattattttagagagactaatcagaaagacaaccaccatagtcacagaaaaaagaatcaaaacaaaataaaatccaacttggtctgtgtctagctcattttggtcttgaaccccaaatttttctgattttcaaaaatgaactgatataatctgtgcgtgggcctagaccacactaggatgctcctccccttcacatattaaatgcttcttcaattctcctaaatctgttctctggatagatgtttgccaagctttactttttttttagctttagagtttttagatatatttcatagtctacataagagctaaaaatacacttgatgatccatctctgacatctctacactttgtcgcagtcacccaaattggaatttcatggaatcataaaattgtaagagatgaataaattattagactcaatagttttcagagtttagttaataaaacatttactgagagaacttgttacaaagtcagattctgatgaggtttagaaatacacaaacatcgtttggtaaggtgtgtaagcaccacctgatcaatccactcattctagggctacatgaacagggagttttgcttacctacatagaccatgtcatgtgctgcatctccaaggcacaaagcagttgcacattctaggacattttcatattcctttgtaatccatatcctttcctcaccctcacctacagccctcaggatacactacacatctgtcttctgactctgtaattttgccttctgtagaatttcataaaaacaaaaccaaaaactacagagtcttctgtgttcaactctcttgcctagtatagtgtttatgagattcttctgcagtttgcctttggtttagcaagtgcagatgatctgtgcagttttgtggctgcagttccgtggctgcagttccatggccacactttgaaaagcactaatctgtgtcaagctcttagacatgaggtagtagggtacaaagaatgtgaatgcttgacttgaagtgaagtattgctgaaatatttggaacttacatcccttggaaacattcccctgagtaacttagtttttctctacccctctgtaacaagagattggatcctggggaaacatcatgggacacttcttatttttaattcatgagctaataacaggtaatgcaatgcatggatgcccctggaattttcttccttgttacaggaaagtattatcatggattcccttaaactcagaaacatttagtaaaagactaattattaataacaaaacagctccataatattattggcaatggtgtatttgctgaattcaatagacatttctcaaaataatatacacaatgaccaacaagagttgggggaggtccttctgtgtatatgtttgtcttattggttgataaatagaatactgttggccaatagggacttgcaagttaggcgggactaagagtcgaggaggattctgggaaatgtagtaaagaaaattcttgcgatccgggcaggaagtgacatagcaggcagactctgcatataagcagggacaagcaggaaatagctttcttcctcttcctctcttctctgggaaccgccatgtgagccccacaagagaggacacatgccaccagcatcctcgatcatataagtctttataaaatatatagattagtagttattgttgataattaagactgagcgagcagataagaaatcctagtcattggccagcagtattgaaactaatataaaactctgtgtgctgttttgggtgcccatgtggtggcggggctcaggcagcttggcagaaagatttatcattacaaacaagtatacaaaaaaagctacaatgagatatcccctcaactcaaaatgtctgtttacaaaaaagacatacactagcaaatgctggtaaatgtggatcaaatagacagtagaaatgtaaattaatatagtcatggtgaaaacagcatgattgtttctcaaaaacacaagaaatagaactgccacagggtctagcaaccccactaatgggtatacccttaaaggaaattaaatcaatgtgctgaagagacacttgcaccagtacttccattgcagtaacattaacaataataagaaacagactcaatctagctgtccattggtggatacatggaaaaaggaactattatttgtgtgtacataatatataaagcagaatattatgcaaccaaaagagaatgaaattagcatttaggcagcttgaatgtaatggaaaacattttgttaagtcaagtatagaggccaatgctcttgtgtaagtgcattctccccgaataaactttacctaacctgtactgagtctagtgaatcttgattcccacacaatatctggtaccagaagtggggtcaggagtgggatcacccacccacttccctgtgacacgacccaacctggtgctctagtatgtacctgtgaccactgtgtggtcagtgccacagatgtgtagttagttctctcattacacaatgctgaatgccttcacatacatatggaagttcaacaactgatctcataaaagtagaacttgggatagcagccagcaagctttggaaagatataggagaacgagggatggagaaaggacagtcatcaggtacacaagtgagagtagataggagaaacaactttcaatgttctgtattaccataggacatgatggttgacaacaattatttgtgtatttctacataacagtaaaaagaatgctgaatatgcccagtaaaaagcccagtaaatgtctgaggtgatggataagctaggtgccttcatctggttattgcattttgtacacaaacatggaaatgttacatgtgcccatcaaatagatttgtttatgacccatgaaactaagtatagtttcatgttttcatgtgaaaagcggtctcactaatgttgagggaccagaatgattaactctgtcccccaactttttctagatcacaaggtctctgagaatttcacttttggagctcatgatagaggattttcagggccacaaacagctgagcaaaaggaaacaagatcagtaagccatagtcaggggatcgtttgggcaggtcatacagagcccagtacactccagggaattctccaggatagccaatgctgtttacaggcacattgctggcttaagatttgtgatattggagacaaaactctgtcccataagacttatatccaggtaagaaaactgaactactgagagggaaaaataatctgattgtagctagtttccacattagtcacacaatcagtaatcagcttagtcaattagctggtggcttgtcaccacagcacctagctcctggtctgacatatgctgtcaatcaccctgggatgttctccagttggatggaagcacatgtccactgctgggtagcgaaggtctgtacaccccttgcctctgagcatcacagaatcccttttacagggctgccaatgatagctttgggagtctgttttccttttgtttttgttgctattgcttctctaaaaattcaaagtgcatccaaggctgtaactaacatatcattggttaatcttcctccaaaagcagtaaaaggaaaaataaattgcagtgggcagcttttaaacaagctggtaatcctagagtggacccagattttaatttatagattcctttttctaggcttcaggactcagagtaggcataaggacattactgaccctggtgatgaatgccccatcctagtctgcaggagacctgtggtctcttgcaccactggagttcaaggcaagatggatgattccgtactgactgacttccataatcctgcagagctccagagagctgaggcaggtacatgccaagaagttaaacacattggaggtgtgaattactcttctaattaaattacatattcacatataaatttgtacattccaacaaatacatagtaacttggaagaatttctaaatatcaccccaagaacataataaatatatatttaaagtcattaaaatagtcaagttcatcaatatttctcagctgctttcttctacatcgcagtggctgactacttattcccctttgctttgagtccccatttcttcctcttaccctctttgaagtctaaacagtgatcaagtttctgcttcagcatcagctaccatgaattcctagaagagtgcacatagcatcacacgccttcccacagtgtatgttctcttcattattcgtcagctcaactgtgaagactcattttttgcctttccagcatctggtctcatctggctcagcatgctgccgatttattgtgctcccaggcagtagaaatacttaatggcactccagtgtcttcttgtcactgtgcctaccaacctgcagcccccgtacttaatccactgacaaccatgacatctcccttcacatcctcatctcttaacaccacacggtaactctattggttcaatatggccagcgcctttgacagaagactaaaatgggatgcttataatgattctacttcatgaattcatactcatgacccaagaatggttattctcatttccaagtgtttcctcccaacttagtatcttccacctatgcctttctatttctgtcttcctattgctttcctttcattcctagtaaaccagatttaaaacctatcaggatctctagttcatttctctgactttatgagatcattattttctcactccaaagaccatggttggtcacatgagttcttttctcacctgcaatcttacttgcttccctttatcttttcctaatgccatcccagaaaaccttcttactatagggccaccaatattgctgcagaaaacaacagtcttagaaatcattgtcacaataaatgtctagaatccaaagaactgtcaatgccactcaaaaattttacccgttctcaaaatgaacacctgacctttgaattctatttattattttcaagtcaacttcctattgcagacacctgtctcaaattatgccagaacctgaggactctcctctactgtggtctctctatggtgtcatgtgagttgctgatgtaaatacatgcctcttgattcaccattatcttctcatagatgcaatgctcacttaaacatctagagctttcctgggaacttagggcaagtgggacattataaaattattaacacagggtagttgacaatttctggggcaaatctttaagcagtggaagtagtagtgataaaggaaatccttgtttcttaattgtcatcgccccctgccccctgagtattctacagtacttcacaggtcctccaaagatgaacctcacacaacaaaacaggagccacagcagccatcacagaaatacccctacttatttctactcctgctccttctccatctcttttactttttttcaccatctcttgcttccttggaatgatgccacacacaattatgcaaacacaagaaaatactaaaaataaactttcttgccataggctatttgcagaattatccaggataggatattgcctatcttttagtaaactttcctgaataaagacaatttatttcctatttatggtgattataaatgaaaccaggtgtgaaaatgttcacctttctcattccacagatgcaagctgaattatctgtctccctgcttagccacagttttagggaggaggcttcgcttttttcagcatgagtctaactgctttcatggtttggatcctttcttctccattctgaagggccattcttggctagtcccctctcatcattgcttctttttctattgttccttacctatgggttccagatgtgtacagatctcttatattatataaattcttctcttacacatattgctcttccacttgtacttctatttacaagttaagagtcactaacaatccccttgtccttacatccttgaacatcttcttcacactgccttcatcactcaagcaaaggatagcaatcattttttttttttaccagctctaatggacagtcttccatattgatcttcccagggttcttaattccctggaacactttgtccttccttaacctctttccttctttgcttctttctttctttgattccaggagccaaatcttttctaaatccatgctcattttctgacacttgtttcccagatttctttgctagtatcatttctgctattaaagagaagcttctggaagtcattccatcccctcccctattgtccctcattccatattctctctgtaggattatacacaatggcatgattccttttatattgatgattttcaaatatctcatctaaatgtatgtcacaagtactattttttacaggtgaggtggcaaaatggacatctttatataaccaatcaattcaaatgctaaaaggcttgaatatgttgccttctacccacaatgctcttctttcaaatcccacctgtcaaaattttctcccttaagagcccagtttaatgtcatcattccttttaaataccatcttggataaaccttccttgatgctaagcatcttctaagaaactttaattgataacgtcctgtatatcaggcaccagaaaaaaaaagaaaaaaaaaagaggagatgcacgtagcccatgcatcagccaagacatattcctggagtaatcaaaacgcaaaaaactatggaaaggccactgtctctaaagagtaatttgttcacctttgttggtccctgagatgctttcaggcatccacagaagcaaaactatttccataataacattaaggtaccacgtggctttccaccttgctggcatctgtactgatgatgcaaaagtaacactggataaaatttcttggcttcttaaaatgatccaaagcagtagcattaaaccagttgctggagtcttcactaccacccactcacagtaaaataaatgccagttccacttgagaatatccttggtgaggcagtaaaaaataattaatttaaaatctcagtccttgagtgttcaactttaatagtctgtggaaaaatgagaaatacagcatgcagagattgtctcttctggagagggggagcctcacaagattcaggaagctaatgaaactcggaattaggaaactcaaacagactcaggcagctcataaagttatgaaactcagtaggccctccccatggttgtcttagtagtaagtaatccctagagtaaggacagactttgatggggctgcctgcaagttgagcaggggcttccagggttgcagtctggggaagttgtgaactgtatgaggctttcagtggtgtagctatccagtcgctcatgctgctcttggcagtcctttcatctatgctcctggagtggcttctggaaactcagtaaatcacacaactagactcagctgtcctgggagcccagtctgggatagaaggcatttgttaatgtcttcctccccaggagaggtcacacaacaaatggttaagtcacgcaacaaatgtttatctctaaagaaagatgcttctgcaattttttaagttgtaaacaggattagctttctttttgtgaaaagccaactttacttcaaaaaggggtggttaatgagcaagcaaaatcatttagacttgagtatttgacaaatgtttcctaagagttggtgagttcctgctactttgagggaaacaattcattggattggttgtcaaggataacatttaaactctcaagaaaaaaaaaaaaagaaaaaagaaaaaagaagggattttgggaagcaaaacaccctgtaaatttgacaactttctagtatttgaggatttaatatgagattagtggtgatatcaacattttgatactacgtaatgaaatttgtaaacatttagaagctcagtggacccagatctttttctaatgtccaattcatggacaagagattcttaggttgaaaacacaccagtgagttttaatgtcatagaacatgaaagtttattaaagcggtttcagatgcatgtggaggctaacctttaagaagctaaaacctggcaaattttgaggcatttattaaagaaggagaacaacaattatatcaacaggctattaaagtagatttctttgttccaaatatgtatgtgcaagagcagattttcttcatatacaccagctatggcagcctgattacaacatcagatatggaacatggttgtcttatatcagacatggaagtgattcccaaaagtgtgacgatttgttaacaaaaataattaaaaataatgaactaactcccacagagatgtgaagataaacaaggcttagacatattatgctgcttgctaaccagtaagggaatcaggcagatattacaaacagttcaaaaaggagaccaattcaactttaaataggagggaggtgggtaaaaacgaaatacaaacaaaggcaaatgggttttccataataatatgaaccatctaggacaagttaaatatttattggttgtctgtaatttacgaagatgtcaaatgcctcaaagaaaaggaagcctaggcagggtatcccttaaagaagtaacagttttttgctgaagcaaatcttcattaaccagttcctttttggccttgcggtgctgtgggttgaatccagtacttcatgcatactgtctctactcagcatcagagcttattcccaaccctgaaaattaattttcattatgaaaagattagtgattttgataggaaatggacttggttttgttgctttaagacaatataaattgatacattaaaaccttctcatttttaacttttctgtgactgctatatactcattgtggtatataaacaaaattctttgtaaaatctacaacttttagtagtgtaaggatattctgtgactaaagagcttgtaaaaaaccactgtgttgaggatcaaaagccttctcagcagctgtggatatggtcccttttgtccacatccagtgtttgtcgatagctagggtgagatgcaatctcagtgtggtttcactttatgtttctccgatggctatgaggccaaattttttcttctaagttcattgaccatttttatttcagcttttgagaactacctgttcatttctttatcctatttattgattgggatatttggttccttgttgctcagctttggttttctttccagttattttatattcttgatattaaccctctgtcagatgtatagcttgcaaacattttctaccattcttcacactgcctctttagtggattcactagtttgtttgctgtgtgggaggttttgaatttcatgcaatcccatttttcaattctggagattatttcctgagtgactagagtcctattcagaaagcctttgcctattgctatatcataaagtgttttccaacttcttctgctaacactttcagagttttgggacttacagtgagcttttgattgatttggaattgtatgttaagcctggtaagagttgaggatagagttccagtctcctacatgtgaatattctatcttcccagcaacctgtgttgtacagactgtcttctcgctatgatgtacttttgataactttgtcaaaaactagaagactctagctgtgttattttgtagccaggtcatttattctatgtagtctatgcatcattttgtgtatgtgtcagtaccatgttgtttggttacaatggccctataatgtaacttgcagtcaggtggggtgatctgtcaagcattattctctttgctaggtattgctttgattataatggggatcttttgtgattcaagatggatttatatcatttttctatttcttaagagtggcattggaattttacatttaatgtatatgttgattttggtagtagagtgttgttacaatattaatgttcccagtccctcaatgtgtgagatctttccatcatgtattaacatcttcagtttccttttttagtgttttaaaatgtttactgtaagtatctttcacttattacttgttaggttatagttctattgtttgttttgcgaatgaaattgtttttgcatttttcccagtgtgtctgttattggtatgtaagaaaattactgattatatgattaatgattacattatattttggtaggtttgttgtgtatcctgtctctttgctgaaagtgattactagctttaagagttttctggcaagatctctagagtttcttacgtgtagaacttgaaaacaaagatattttgaccttgtttcctgtttgtgccctttgatttctttctctagtctctttgttcaagctaggacttccatcactcttgtcttgttcctaaatttagtggaaattttttttccatatttagtaactaaatataaaacacattgactcaaggcttatcatacaggctttattacattgagatatgttccttctattcttagtctatccaggactttcatcatgaagggatgttggatttttgtcaaaggatttttttctgtattgagattatcacatgacttctgtctttgcattgcattatgtaatgcacttattgatttgcatatgttgaaccatccctgcatcttggaaatgaaaccagctttattacagtgaatagtattcaatgtagttgttaatttggtttgcatgtactttcctgagaatttttgcatatatgtcatcagagatacttgtatacaagtctagtcactatgaaaatcagcatagagattccacaaaaagctagaaatagatctacaatatgacacagctataacactgctgggtatttaccccaaagactccaagtccacatactactgacacacatcagtgtttaccacaatactattcataatagctatgctatggaacaacccaggtgtccacaaagagaggaatagagaaagcaggagtttcatagatacacagtggaattttttcatccataaaaaaccaagttatgtcatttgcaggaaaggagatacaaatggagacaatcactttaagtgaattagtccgatctcagaaagataaatattgtatgttctatctcatttgtctttattatattttataaatacataaaattatatatgtatatatagagagtaagattatttttttacaatttcatttatttgaaggaaaattattaattgaagcattatgcccaggaaagcaagggacagagggaagagtgagaaaggaggggcagaggatgctcaaggtgcatgatatacttgtatgaaaatgtctgtatgagatgggatatagtaccatatacaacaatgacacacaaagtacttttaaatcaaggaattagttaatccctgcgaccgtgtttttatggatttgaactgactcaaaggtcagttcttcccactttctcatctaacttcttctggagaaaactgggtgccctctgtagccctctcctgcaccagcacggtattgtaactaacccattcggattacactaaactgtccaaacccaccatggctcatgagtctaaaaaggatgctacattcatgctgatcttgtcaaatctccttagtataactttttcctaatttccaccacccaaacctgttttcttgcacctcagactcatgacagttttcttgttctttcttgacttcatttctcctggaatctgactctgtcaaagcgccgctgcccttgcagatttacctagcagcagctgctctttctccacacaccttcaagtcagtaggtattgtgggcatacttcccttccctagtattgcttttattcctctgtcctgaacaaaatgtgctgctttggagccactgtcctccacattctaccctgtcatcaaccacctgccccttatcagctctaagctgcagaagatggacgccttggttactcttgaattttttatcattcttcctaaatcacattttccatctctttatctttgaactcaaatgacctgtgctctcttttcatgcttatatcccagggcttggcattaccaaacacttcctctcccttccataatcatgccctctctagttgtagctatatgcccttcctgtgtccttggtctcttttcttcacatcattccattagattctttatgatcttcatttctttcttccttctattgccattccccatcattttccatttttatgactctggggcacattcttcattccttctgctgaattcttcaaatcatccatgtttttttctgtcaccactgcctggcaaactgaatttttttaagcgagagcatcagctatattgagggaaacttgggagggaaccagctctagatggttcgattagtcttttgtgcctatacccaggtcagatgaccaatttgcaagtcaggaccactatggacctccaccagaatttcccctgcccaggcgtagtttgggcccaagggcaggagtgcctagggaacacgcgcatgctccacgtccctagtgcagtaagtgaggccaactagtttaccgtggtggagataaactgaatttattacatctccaactgattgccttttctgctctctattacagagctgtgagtgctaaccacaaccctaatgccaccacacatccattttctttgattccatgaagttttcaaagattaacatgcatttctaaagtcaattctttctattttttctcatacccattaagcacttccttctactaacttcctgggtgtatcagtaatgcaattatcttcttcccacatgacagtgagagaatgttgtcatgtgtgatctcctctttctgctatggatacccacaaatccatccacacacatctctgcttccttctctttgatcataaagtgtcctttcccaggataatctctattccttccaggagtagataagaacttctttgaaagatgcagccttcctgtagtgaccccacagggaaaggctcaggaaatcaatacttcgatctcacttgtcttctgtctttccctgtctcttgctagtgcttctcactgatcgaaaataattaaaaggcagatggcacgagaggccattgatagaaacaatctttcaggaacagcacaaagggaaaagggaaagagcagctccagaaaaccaaaaggaaatgtctagcacatcaccaacctctgaaggtaggaactgagaaggctttttaagcatttgcatttcagtggaatttactctgcatgcacacttagattctaactagtgtatagtgtcaggcggagtagtggggaatatactggaccttggttgtctatcaaatgcttcaggtacaaagaagtctcagcatccttccgacagtatccattggagaagagaccacccttagacttcctttgcctactgcccacttgacagcctactaataggcattctgcagttaagccttgtaactccctttacatagtcacttctcagtctttggagacacccctacttctgcacatgaagggatgcctctgagggcttcacccatggttcggaaggttcaaggagctggtgagtcaatgattgcttttctgagggctcgttctgaaatcacctggccccgatcacctgtaggagagaaatagattataatgtctaatggatgatagcctccgagagaaataagacgaagatgtctgccacattttccatgcaattaatttagcttctcctaactcttcctttgttcttggtaacatccagtagccccaatcactgtagcaaggaattgttttgctattaagaatacatgcttctctgtcatagcaattttaatccatattcagtcactgtttatgagaaaggaaaccagaaaattttccttagccctaagcttcattacagataaatatgcacaagtgaggctgaggccataaaggtgtattggaattgatggagacaatgagtatctgctctcctgattagatgacaggttatacaaggcaggtttgggccagagtctgtgagtctgaactacagggaaaccctcttctgtgagatcaaacctgatcatgggaaatgaagtcacagctaaccttaactgagactctcaaaagacttcactggagcgcctgtttatctagcaaatgattcaccaatggctcctaggccactgtgtgagctgggcctctgcctgctatttttaagccagccatttatcacaaccactgctttattaaaaacgtaccctccgctcttcagagaacaaatatgaaaatctggtttctgaagatatcagaaccatttatttttgaagttggcagcacaggctgtgaacgctactctgggatgcatctcgtctgtaggtccatatttttctgaatgagctattctctcatctacaagaaacaatgaaatattcaatgtgctctgaaaaattaaaatattttgaaagggctaaagaaaggaaactgcacaccctgattggaaactgctgcagggagcctctctgatgatgcagaagagaaacgtgttgggaccagggccctttggccaccccatctgtcctcagtttccctgcagagctagcattcactgccccccagctaagacaagagatggaagatctttgaggtagttgtccaagtctggacaggatcttattattgaactagttgcccaaggacaactagtgaaggagttagtcggccagataacttgttagaggctaacagcgagaattggcttgaaattagacagaccctagggaattccaactcaaccatttattgctgtgtatttaaaaatgtcttttctctagtgaaatctgttttcattcacagcaattaaaaatataaatatacatatatgtgggtgcgtgcgtgcgtgcgtgcgtgcgtgcgtgcgtgcgtgcatgtgtgtgtgtgtgtgtgtgtgtgtgtgtgtgtccactagcagcttaggagactggctgtgactattaatataaaaagcaggcatttatcataataacagaaataaagacttaattgtacttatgctatgcctgcactcaagattactttgtgctaactctaatccagagacagcatatgtaaaagattctatattcatcatcaatttgcagatttaaaacaaaataacttctagggttaccacaaggtcaaatagcttgtcacaaccaagatgtacttgtaaaggcagagccaggattcagagtcagccgtctggtcccggatcataatctctagacatgtacttttctccacacaaggattaatgttaatttttttcttatctacaataacagtttggttttatgtccacagaaaagtgcaggaggtcattattattaattttgcagggatgtgaacctctgggattttgagggcatatctgacagttctggagttattttctacatacattgcctgcctttccactgtctcagatatccaacacactgtagacaaacagtatttagtttacactcatcacatcgtaacagaagccagccaattccattatactgagatacaatggacataaaactgggtgtttagatatttctgatcttcatcacgctgtccagatttgtgaagcagttttaaagcagaggagtcacacgacatggagatacaatctctgccacactgctacccactgtcacacaacatgaagatacaatctctgtcatactgtcatcagtaagctgaggcaccagtggccatccacagccagttctgaggcagagctgaagcactgccacttttgtaagtgtcaacaaagggaactaaccatgttgtaccagaacttctccagatttgttgttctgaatgaattggtatttattgataagagttatcaagaaatatatgtgagcaattgaatgaatgaactgaaagctacatacaaacatatcttcgtaagtgaatcaaaatttagattcctggagaaatctatgattttacaaactcaccttaggcaatgaagatttttttttctgtgatatgatatgttctggcttatctgttgcatgtatttattatgatgaagagtcagttttcaattgttatgttatttaaattcagatctctctctccctctctctctttctctctctctctctctctctctctctctctctcgtgtgtgtgtgtgtgtgtgtgtgtgtccctaaatcttagaaggtatgatataaatattttgtttaaggttgaggtccttatatccattagtttctgtattcatccccattctctggatactatggctcctctgattaaggctaaaagtagcagttgtttgtgatgtaaacagaactatttagaaggcagcttgaaactatgtcaatttaactaaacaacagtatttggtgccacccccacccccatccatggataatgatctctcctgtcattgagggttttatatattattttgtaattttttttattagttcaaattaggaacaagtttgtttacatgtcaatccctcctccctctccctccccccaacctcccacctgcccaccaccccatccaccctccactccccaggctgggtagggccctcgacagggtcttcccaaagtccaccacatcatcttggattgggcctaggccctcccccatgtgttcaagccgagccatgggatgggctctcaagttatatgcagggattcctgtgtggggaagggtccaattagatccatttagagagcatttgcttattttcatgacagagtgcttctattatacaatgaagcatatcttgcctagatttgtattatagattgtaagattcagagctagacaagaccattggtactgccccccctacacacacagactcttcagtagaacagattacctaggtttaaatctgtacaactatagacacatggatttgataaatatgacaaaagtacacagcatctctagtaatatatttagggaaattagatgtccaaatgcacagaatgaaactagaactttatacctcaccctataggagaataaactccaattggatcaaagttccaaactctgaaactgataggagagaaggtagggagtatgctacagcacacaggctattacaagcttcctaaataagattctgaatgctcaagagatagggctgacaactgagaaatggtacctcatgcaactagaaagcttcttctgtgcagcaaagaaaacaatcaagtaaagaagtatcccacagaatggagggaaatctacagattactccaacagaggattaatatttagaagcaaaacataaagaatacaaacaacccaattctaaaatttgggccacaagactgagcaaagaattctcaaaataaaaatacaaatggcaagccttcatccaatagcttatggaagcagaagcacagattcacagccaagcactgagctgaactcctggaatccacctgtagagagggaggagtgatgagcaaaggggtcaaggacatgtggggaaaacccagagaaacaactaacctgagcaagcgggagcccagggaccccaatctgacagctggggaaccagcataagaccaaaccaggaaccctgaatgtgggtgtcagttgggaggcctgggcagtctatagggtctctggtagcggatcagtatttatccctagtgcatgaatgggatttgtgagcccattccctatggagggataatctctcagcccagatacacagaggagagcctaggccctgccccaaatgatgtcaggctttgatgatcccccgtgggaggcctcatcctacctggggagtggatgggttggaatgggggtttgtgggggcatgggaggacaatgggggagggagagggaactgggattggtatgtaaaataagattgtttttaatttaaataaaatttattttaaaaatacaaatagctagtaaacacttttaaatgtattcagcatcactagccgtaggtgaaatgcaaattaaaacatctttgaaattctatctcaccccactcaaaaacaccatcatcaagaaacaaaataacaagaaatactggtgaagatgtggggaaagaggattctccattgatgtgggagtgcaaactgatgtagctacttggcaaaatgtagagattcccccaaagactagaaacgaccttttaaaagtaatacacacacacacacacacacacacacacacacacacacacacacacacacacacacacacacgcgccggacaattgtgatgctgaacatattcctggacattacggtggaccatgaggaggttctccataagctccattagttttttctacctgtaaattgttagcagtgatccaacaagcaagaggcaccacctgtaactgcttttctgtgtaacaaaaacttgactgaatacaaatacctccattctgtcagtcaccacccccttttctacctccaacacccaatttcaacagatgtcagagctgcattcaaatcagtttaatgttattcatgtggtactgagcctgcaaatccgccgtaagtggaatttcccaaaagtttaagtgtaacctatataagcatgcatcagtagagataggagtatgatcaaaaggagaaaatatttaattcaattcttaaatgaggtttattcagagctcagcctaatggtgattttgtatatttccagctatggctaatatcaaaaacaacagatcagccttatgatggctattctcagttgtcaatttgactacatctgaaattagctaaaatccaagtgtctgggtatacctgtgagggattttttttaattaaacaattagaagtaggaagaccaacttttaatctgaatcttttgatgtggaaagaactacctttaatctgggccatgacttctcctggaagcctatataaaaggcatggaagaaggacatttgttctctttttgcctgcttgcttttgttctcactagcaagtcctgacattagagcataattcttcaggattttgatggacactgaagaccagctgagacatccagccttatggacttaacaactactggattctggaacctttcattggcagacagccatagttggactagttgaaccacagcctttaagccatcctgattctaataaatcacctctctctctctctctctctctctctctctctctctctctctctctctctctgtgtgtgtgtgtgtgtgtgtgtgtgtgtgtgtgtgtgtgtggtgtgtgttggaggggtgtttattctatacattaggttcctctagagaaccctgattaagataagcactaaaagaacataggcacagaggcacttgtagaggacagatggtgctttatgctgattttcaatttgataagatctagaatcaccttggagacaaatctttggtcacatttgtgaggagttctgtagattaggctgagactgcaagacctcccctaactactgagataaataaaaaggaggaagtgagctgagtaggagccttcactattctctgtttcctggctacagaagcaatgtgaccagttggcacagcctcttgctactgtgacttccttgccatgatggactgtaccctcaacctgtgatccaaaagaaactcttctttacactgcttttgttgggtattttgtgtcaacatgacaataaatatagaggatgagtgggtagtttctacccaatcatctcagttgtcagaagaccctgtgtttatctaccatgaacaccgaaataagatatggacttgaaatatcacatctgcatacagaaaagaggtggggtctggtagagatttcagcagagtggctgcagaccaggagagactggaattggtctgctgggtttgaaactaattttagcttcatgaatacatgcattttgcatccagtcctttaaaaagaggtgtttaaattcttccacgtgacaaaacattttcttttctctgaatgtttaatcagcaaagtgttcctatttagtcaaggaacgactgctcatctgtgcaaagagaacactgtcgttgaagcagagaggcaattcctgctcccttctgtcaggagtacagttgttacataggttcccctgtatttcccaagagtagactgaactacaagggaaaattccttgtcaaattggatcagatagaaaggcctaagagaacttgaggacttgggagcattgaggaagtcctcagtctgtgtaacatgcagagaacccgaagaaacagtgatggtggatggatgtcctgctgtatatgtttctcttattggttgatgaataaaacactgattggctgatagtcagacaggaagataggcagggctgggagatgagaataattctgggaaaagtaggcagagggactccaccatagagtccccatgctgccaaaggagtaacagcatgccggggcattgctgggtaagccacagcctcgtggcaatacatagactgataaaaatgggttcataattaagacacagatagccaataagaggccctagccatcagtcaacagtttaataattaatatactgtctctgtgtgttcatttggggctgaagcagccacaggaccaggccggacaagaaaactgccagcaacaagacagaatcaaggaatgttcatggagaccagggcagtagggaataggcttggactggtgcagataaggcagagggttgacaatgacatgcaaagaaggtaacagagtaggtttggaaattagctgcaatacagggaccattggtgccctaaagtgcccaatttggtcataatctttttttttgtaaattttttattagttcaaattaggaacaagcttgtttcacgtgtcaatcccttctccctctccctcccctcccccacccttaccctctcttccccaacccacccccaccccatccaccctccactccccttggtcataatcttaatttatatttttaaattagaagaacaaaaattagatttaaaggaaaatagcatgcatctaaattaaagattgatagaacatgtgttttcatctataggctgtgttgaaataataataaattttttttttgttttggagtggaaggagaatgaagatgcatacactagttaatgggagtccaacaaatttcaaaaaggtaagaaatggttggagcttatggtggtttgaatgagaatggttccaggtaggctcatatgtttgaatacttggttcccagtgataaaagtgatagggaaggactagaggtgttgcttgtgtgtcattggaggtggcctttgaaatttcaaaagccaataggattcccagtaaagccaataggattctctctctctctctctctctctctctctctctctctctctctctctctctctacctcccacttgtggataagttagtaagatatcagatactgatacatgtctatccacctgcttccacattccccaacatgatggccatggaatcaccctctaaaactgtaagcctaataaactctttcttctataagttgcctggtcatggggtcccttcatagcagtagggattgtaactaagacagaggtctccagacaaatggctgtaaaaggcaaagcctagaaaattcctgtgagagtctgcagtggactatacactcacaagcaatctgggctaagagtcccaggactgatgaagcaaaggaatgagaagagaggaaggtgtagagcactgttaatattgattactgcatttgcctcctcaccctgttagaacatgacttctagaacccttccttaaacgttttgagcaaatcaggaaaaaaagtcatcacctcttttaagtcttttgactccttggggaaagtagatcctcctggtggcatttggtattattcaactcatcagccataaaactaatctttgaattcaccccaccttcctgttctgcctgtcaggtacacttctcagtcaaggagaaagtaagttagggggaaaccccttcctacccatgagagggaggagctcttatacttcattcattatacatggattctcaaaggaaatacaaacacatgaaaaaaataagttgtagcaaagagaaagactatgaattctagagaaaataggcataatttgggaaacagaagaggactttcaaaattcctccagcactcttaaagagatttaaaaatgccttaaacacacaaaacaaaatcaaattgctgtgaaatgggagcacaaagcaagagagcctacaattgaagaataattgtttgaagataaaacaggaaatctaaagagaaaaaatacagaaaggtatgagaacataaaattgaaagacacattaggcatagaggtttattttaaggaaccaccctctaactaatgagggttcaagaaaaatgggtcttaataaaaaacagtgtgtgctagtttgccagtctagcagagaagagatacatgggctgcaggacctaacacagggtatgaagcacaaagtcagtgagcagatggcattgtttcctcctgacggctgtgggagattgtccctggatctcttgtggcttagtgaagattgcttccttctcttctccttggcttatggaagcttcaccctaacctctgccctcttctcagctatgtgatcagcttatgtctgtttctatgtctaggtttgtctttgttataaggacacagtcttcaaggattagatgccatactcagcttcatcatttgcaaagatcttgtttctaaaaatatccacaggtactggaggccaggattcctaaaacacgtatagacaaggctacaattcaaattacaacagggtgaaaattgctttgaaaattaatagaaaatgcaccagggattaagtagacacaagtcattgagctgaaagagcatctttatgttattccaaaacaggaagtttaaagaaagtccccaagcttccagaaaggattaaatgtgacttcaagggaacaagaattagagagtcacaaaaatgtgtcatagtggatgttagaaatcagtgaccagaagcattggaagtctaagtgtatttttaacctctcattctttcttttaaattgggttatgacacacatggtgatggatgcacattgtatcaccataaagaccaatatgtatttctgtctcccagagagtgatcctcaacaatggccttctgcctaagtagtgatttctatcacatgttctcctgttcataaaccttagcaactacatttgatggttgtatgttgtatctttctcttagcatgattgttttaacattcacacaagttgttgggtacatttgtagcttattcttttcttttgctgagtaggaagagttgagtagggtactaacaccttcatgttacagaacacagccagccaagatcctgagttaacctgatggaatgtaaaggagggaagttagaatgtgtgtcccaagaagatagaaccaggtttatgttgttgttttttggtttggtttggtttggttttgctttttcatgttcagttgtggcagggtctctttattgttatatttctggcacatagaacagtatttgaacataacttgcccctgatgacaacttgttggatgaaacacatactcagttacacatgatagttacaaggataaaatctgttgcctaatatatgattgagatatctatctttgttcactccttcagaaatactaggtgtggggttcctgactttgacttaattctaggaaagacatagtcacgtgtctctcattccagtctctgctcaccgtgtcttcttttcttcattcagctcagcatcattatccagatttcagtctagttgttgtggagagctggccgaggagcccctgcatcacttcctctcctgggtttcagtgatacaggagcttggctatgcccaaggatctacattcatctgcttcaagaagaagacttgtcccagattcagaaagagactttagacacatggatactcaaaaggcctgttaaattaatcaaagcaaccaggaggtagcattgggcaaaatacttctttgtgattaaattatggccctgctacttgcaatgctcatttctctaagagaccagacctgaagcctggagaaatcaggccacctctccctgcagtttgtcccttgagaggaagaactaacaacccttactgtgagcacacagaatctgtgaggaaaagcaagcccagccctcaaaagaccccagtgccagaatatttctttttttcaggggatttctctgaaatccaggtcccctgccacgatgtccatgctggctatcagtcctattctttcaatttaagctgtaaatggaaagaatttacatgttcatgttctcatcatatctataatgttctcctacatcaagaccccatcacgcagcctctgatgtcccttctacatgctcccaccctaagacccaatcagggcccatggtctggactttctcttctaataatgttcgtttctatagggtcatttcatgtttgctcttttctcaaacttacagttctaatttctaacatttagttgttctgtcaagaaataagaaaatgccttgcaaacttaaacttgaccatgttcacttcttaaattctgacttgtggtggagggaggggcttgctgtgttgactttaggaattggctcacatgggcaaagccatagaaagagtcgggagtaaaagagaaaagcttaggcagaaaatctctgagatcttcctctcacattacagaggaagcaaatgggagtccagagatatttgcagacatggctgagatccaaacactaacaaggctagaagtcaccataagaacctcccgatccttgccaagtgctctttacacacaaaccacttctctcagtcttttggatgtccagtcatggatggccaaaggtaatgacttgattttgattgacccatttgcaaaagcaggaattttgacatctacatatagaatctgtggctaaataacatctaggaaaagctgaaatgacaactaccaagaggagcatgcgcaggaggtaatgaagtgatataggaggaagctctgctgatggatggctcaccccatgtacaggaggagtgaaagaaagctctccctgggatccactcactgtgtgcactttgtgaacatgtctctacttcaggaaatgttgtttaagttaggaatcattgctgataagctaatatgcaaaaaagcatctaactcaatctagaaattcatttcaagagagtgttgaaaaattattcatttccttccatctcttgtattctgttggttatgcttacatctgtagttcctgatcatttacccagcttttctatttccagcattccctatttctttattgtctctatttcagttttttggtcttgaactgtttccttgagagaattgttgatatcttgtattttttggttagttttttcttaccttttaagggattttctcttgcctctttgaggtcctctatcattttcatgaagatgtttttaaggtcattctcttctgcttcatctgcattgtgatgttcaggtcttgctggtgtatggcagtcctcttctcatggatggaggtgtcactgttacccaggtgtcagcagtgtttgggcatgctgggtcccgctggtccagcagttggaggcagagctgtcacggggcctcagtgtgtaggatcccaccgctgaactcggtccagcacgcaggtcgcttgtgtcagatgactctgagcagcgacgaccctaaattcccaactttttcttttaaatcagaattcatttaaggaattagggtccataagaggcagaaggttgttttgcaatctgctgctattcaccgtagaatgttagaaaggtgaccaggcctgcctaatgggaggagttggctcagtggcagaaaatgggaatggtagacaaatgtttcaaaatatgtcattggcacatcaagttttagaccatagacatgaagtttttattcaagagttataaacatttttttaccttttaaatttgattgtgtgtatggatgtgcatgtatggttgccatagcatgtacatagggatcagagaacaatttatgggagctatttctctcctcctaccatacataggtcctagggattgaactcaggtcgtcaggttaggtagcaagtccctttatccactgagcctgttcactgacccacatttttccaattaaaaaactaaagctggttgaattttgaatgtggagtttggggaacacagcaagccatatagtttctgtgctgccggggctatgatgtcctgagatacctcaaggacatttctgtagtcacatcttaaggggacagttaagcaggggaacataggctctggatggcccttctgctatattgtgttttatttatcttagctgagtaatctgtgaggccccagccagaaagctgcacttcgttacaggcagacatctgccctgataagctttgttctttcccatgttttttcaataagacatggcttcacgattctctatctccacctccccaccccaccccccaattcacagaaatgctaaaattgcattcgtgtttccaactataaagttaacatggccagcaaaagaggaagctgtctgctccccagtgtttgcctttgctgtggatttttaaaaagcgaagcctttaacgccctgctgcatgcaatatttcatttcctttagacgagacactacctcacagtgtccacacgcccttccctttgctcacagtagcaaccaagccacatataacctatcccgggtggcatcccacctcttcacatgaaagcccacgttttaaggaaacagatgtagtaattaaatttttagaaagttgttgatttgtgtgatgctaggacaggcttctatcactacagggtctttgtgggctggaggggattgaattctggggactcaggtcctcctcctcctcctcctcctcctcctcctcctcctcctcctccgggtggcatcccacctcttcacatgaaagcccacgttttaaggaaacagatgtagtaattaaatttttagtggcatatatagaaacttctctttaaaacagaaagttgttgatttgtgtgatgctaggacaggcttctatcactacagggtctttgtgggctggaggggattgaactctgggactcaggtcctcctcctcctcctcttcccccttctcctcctctttctccccctcctcctctttctccttctcttctcccttccttgctttcattgtttgtactccatgcttccctctccaacaataaatgtctctttttcttcttggaacatatatgaaatttagcaataggcctctacctcctttggattccaggtttttttattaagtgttagaatggagagaatactttcagaaacaactttcaaagaaaggtggtaaatgggcattttgcaaaagcttaagcaatagtgctgagatctacagagcccactaaaattgctgactgggggcatccacacaggagggagcctttaatttattcctctagtcacatctttcctctgtttgcatgggcaggaactggaccttatgctactcgcctgtcttagggtttctattactgtgcttaaccactgaccccatagaacttgggggcaggggttgttattccagctcacaatattcaggtcacaactccatcactgagggaactcaggccagcctgctttactataaactccagggtggcactacccacaatggcctgggtcctcctccatcaagcactatttaggaaaatgcccccaaattgtgcttccagatcaatcttatggaggtatttgaaatttggtgccttcttctcagagagctctagcttatgtctagttgtggcgtggagggagagaggaagggaggaaaggagggagggagggaggagggagagagagagagagagagagagagagagagagagagagagagagagagagagagagagaagcatcttacacccaggactatctgtgaaacatggacaaaggaaaccattactatccctctgatcctgttcccctccctgctttagaggaaagagaatgtggaaggtatgcggtgggtggggaggatcaaagacattgtgggggcatggtgctcatgatgtatgctctaggcctttgggatgtaacagggttggtttccactcagataagtcttagttgtggttctttaaagcagcagagtaggaagttcaggatttgaacagtaattatcctaatgggccctgcttctctctaatggagtaacttctgtctgtgaccttcttaatttctgtgttgcctgaaccccactaagaagatgtgaatcaaccattttcaaagacagagaggctttaacatcaatctctgtgtgcccaaaacacagtgtgagtggggacaggggcttttaggcccccagttttgtttcgtttgcttctttgggggtatacagataggaaatatgttaagacagaaatgattagcaatgttgtaaaaaatatttagactggttttatatgaattccccaggtagagaaaggcctttctctcacccttagcagcaacattaagtaaaaacaaagactgtttggacagagaaatacctctagagtttcaaggcatcggaattttattacagcaatgtgagactcatctttctggaaaagatgcaggcagatctcatgtgttcatacttcagtaaaaaggataaatggagtaattcaccaatcccatttgtttctcagaaaaaggaaagaaagaaaaaatccactgattttatagcaagtacccatattttacagagtatgaatgttattgactataagaattacaactgttttatggattgctaaagaaaaatgctttcagtaaaatttacataataccctactctcactcagagtttttattttctacttattgaaagagctattttagacttacttaggcacagatttttatgatatagcacatggatacttcactaaaatgggaaaacataacaaataaaattgataaagatattcttaagacacactcatattcagatagtttctttaaaacttttcttctcaaggcagttgaagttgtttctacacatcttctacagtgccatgaatattggtgattactgcatttcattaaaacaaaccaccatcaccttgttcagcaattccatccaactacatgtcccctatggctgtgtatagagcctgtcctgactgttccttcatcaacaagatttataagacaccttatttcaaaaggagaaaacagccatctcttagaactgacattttgttccacaaatcatgattttcaaaggtccttccatattcctttcatagtttgagggaagcatttattaatctttaacatttgttttgataaccagatctgactgtaagactcattggcatatctaacaattcatccatgtgcctgagcacgcaatgcatttattgaaagtcaaccttttcctaaacacgatggaagaaactaataactgcaaatacagttaatgtagggtcttgaccatcaagaaattccaacaaaagtgagaaatagatttaaatccatagtgacaacaaggcatcaccaatgaaacaataatggcatgtagtaggcatttgctacaaaaataatattttggattaggtgggctgaacaaagagcacaactgcagttaatacagatcatagatggggcatctcctggggtcgggtggtcaggttattttccttcacagcagatcttagacattcctagtcatattgatttgtgtgcagatttgttagaacctcagcttccctctttggctggtttgttaggttagaaagggcggaaatacccatctcttttctagatctctcaagactaaagaactatacccttaaataagaagtttgtttcaataaaaccaagtcacagatatcagagaagaggctggaaacttgtgggtcacagccaacagggctgagctaagtgtgtccctgacctccaaagccactcagccgtagcaccaggagtggtgacattatcccaggagtatatgatggggctggtcctcaaggtataacacaaacatttggaggcaggcatatcaccatgactaggtaagcaccaatgtcatctttacagtgatattcctccagtatgtttaaggtgaaacagatttttctttctagtcccaattgtcttactaaaagatatccaacatggttttttttttttttttttttttttttttttttttttcgaggaaagctgaaatttctgggttcagttcgcgctagtggtagggttagggagggcattggcttgaacttaatctttctagttcctactttcctaagaggtgcactggtacacaatggtaagaagattcctattccttctcctttgacttcatcagcttctgcccagaggaaggccagattttgtctaatattcatttccctagtgttgtggtttgaatatgaaatgtcacccatagcctcatggacttgaacactctgtacccagttgataacacggtttggggaggaggttacggaacttccaggatgtggagccttgcggaaagaaagatgtcactaggggtgggtttggaggttttatagcttggccccacttcctgttctctttctctgcttcctgtgtgcagctgcaatgccattgatctgcctccccatcatgatgagctagatcccctctggaacataaaccaaaactgccttaacttctttttgtcaggatatcttatcacaggggcagaagaatggctgacaccgctgcccagaggaatggcagtagaggtatcaaaagaaggtttggaggatttgagctcagttttcactcattacacttctccagggggtgagacacttgagagggaacagccgaattgcagcagccagtctttgctcttgtgtatgatggaaaaaaaaaaaaaacccactcacagtttctctatcttgggctttttctcaagctgtagaacagctaggcagggctcttggcccatccttcagaggcaggctgctcctgccattgctttccatgcctgtctacgctgccctcctccacgtcaccagacagcctcctatcagttactgctggggagagtggggctgtgcacccaaggcagctagatggcaggaatggtgataagtactaagcagtctttttcttggcttctttttcattcctttgtcactctagatgtgtttcaaggggtgggtaatgatttaagctgaggccgtatttaagcttcttagttttagttttgctgtagatgttttcctggaaaatccctgattagtaggtattttcttgatttacttcccttagcttcacacttgcaagatagaagaggtaagaaatagaatttgagcctttaagcacaaattcaaacctgatcacttaaagcagctccgtctgtggtctataatagttattcaatcaactggttagtagctagtaaaatttgattgtcaaaaataaataatgacctagcagatgtaatcatttatgcaacaggggtagagttatggggtaatccaccattctatgattggatttgaagccaaacccacaaaaggtattcaatttctggtactataaacttgttcaaaagcccatgttgagggcaccataggacttagggataacttaattgttttgtttatctaaatagcataatatcaaacaactttcaaaatatgagggtttccactcatagacaacatcttaatcagaaaaacctctctttgcagtgaactgtaatgaagtcagaggcatacagcagcacaaggtgctaaagataagtgactatcgagtgtttagccccaaacacctccaaggttcagggaacattgcagaagatgaggaagaaaggccatgagagccagaaaataggggcaggggctacaatacacagccattgccttcacaagctctcaacagctatgaatgtctgtcctaggtcttcaaaagaataagcccatcaatagtcaggcaaggttgaagaagaatctcttggggccctatccctccctgctaaactatttcctatggatggattcagggaacgaaagagttactgccttcagttgtatacccactagtaatcacactcggttccactggacagtcccaaccgaatggtcatgcagaaggctttgattaaaataaatgggacacacaacaaaaccaaaactctgaatctggtattggcacaggtggagaacctgagaaagatgggagggcttggagagtgataacagagggtgtagtgaacagaatgaattatatacatgtttcatctgctgtgtgtatgtgagtgtgtaattatcaaagaattgagttaatattttacaaaaacctgatgcttgttcatcattactgtgtttcttcatctccagagccctttagtttcttatttctggtcaattagtccactttatcctagactatgaagattgccagttagtctgttctaattctgtttgcaggcaaagcagcctcactgctaaagccttgtgaactattattagacattttcattcagaggattccaagataaacagggcaccttcttgccttttaacagcagctgtttgtttggaagaacgtttgctagggtaatgtggcatgaaaataaaattacgacaattggaaaagtttgaaagctaaaaagtcagagtcggaaggaagcaatgagaggctgcagttttgaaaactgcttctacaacacaattgtgaattgccagatagcaagacatcccactgctagagaatagtttcatctggtcagaattgctggtgcaactggacttatatttcttgattagtgtttctcacattaaattctcttacagtcatgagaacatttttgagacttaaaaagaagcaaatgttttgctttttgacaatgtcttcagaagagaactaaaatgttcctttaattttaaacaatagtttgagttcacattttcaagcttaaagtttcctctagtgatctgaaatgcctatgtgaagttgtttgaccaaattaacaatccagagcaatcaacaatcattgtagcctacaatcaacaattttcgttatttatctaggtaataatatatgatgacttcaactcacttgtgcacctttgaccagttatttcacatagtgtatattaaaaatcaattaaaaggaaagactcatagacctatgaaatctcatctaaacataccatacagtacaactggttaatttgcagtgtggactagtccatgaagtgcactgtccttgggtccccttaactgtatacctaaggtgctagacagctttgtgatgggggaagtctcctctccttaccttctttcacctcttgttttgcatgggaaaggaaggctgtgctttgtaacactgccaatcagctgcaattagagtattacttcccattactacaacactcatttcccttcatatttttgtggctctgcttttgtactaacaacagtatgtagacaaaaaattccatgtgcatgaaacaacttctctcagagccccttcctcatctctaaccctgtgcattagcaaggaacccatgatccagcattgtgtgagggcaggtggtagcttacatttctgcaacagtttgaaagtcctgtcattttatcagaggaaaagggcacaactctgactcttactatctgggtatgttgatctgaacctacattctttgaaataatcatttactcttagctagtggtttctgcaatgcctgcatgtagtactagtttgcaaatcatggccaacagccgcttagagagtcttcccttactaaatagggttggtcaatggtaaccagtggagcactgtggaattgatgaaatgtgacttatgaagccagataataagtagcatctagattacccctggctattcaattactaagcagtcaggaccatgtactaaagacattttaggcactttctgcaaatgtaactaacacacagaagaactgattgagtgcaccccttggaaccagacccccagacgcagtccatgcttgtggtgcttaccaatatttacacagcaagctcatgggggccctcatcagaagaccctcaaccaagtcactcagccattccttagagtctgtgaagacagtggagctgttttaagttgtcatattttagagatgatttattaggcagtaatagatagttgttcacagctcccaacatagtgcttactaattttgtagaccgttactctctttcatgagaaagcaaataatgttctttagtcttcaatttaatctcaatattaaattctatttggtctgatgatggggaaaaataaaacaccttaatccaggctgagatgagtcagtaacttcagattttacgtcagttaatttaggactttttttctcactcctcatttgcataagcacagcatatataattagggaggggggttgtaactcacctaccatcatggtatgagggatacatgcaggtacctgtagtctttttaatccatcctcagcagcctccactaaaatagcaaagggaaagctggctgtaggtatattactaataagggatataaagactgacttccaatattttttctaggtcagtacttttcactgttttatcagctctaaaatttcattaaaatccaggggaattgtacagggcatagaacaagccaataaagtcccacttaaaattctatggcttcttgtggagttagaaggccaattttaatttaaatgcgtggatcctttgaaagtccttacctctgtcatacagtatgggctgcccaggaaggtttattaacacacaaagctacttcagaggcgggaatgcaaaggaagttgttctaaacttagttgattcctttttttaatttaaactagaaacaagcttgttttacatgtcaatcccagttccctatcccttccctcctcccctgccccccaccaatcccttatcccatctcctttctgctccccagggagggtgtggccttccatgggggatcttcaaagtctgtcacataatttggagcagggtctagtccctctccctccccaccttcccaccccacctccactcctccaccctccagtccccacccccctaatcccggctaggctgagagagtatccctctatgtggaatgggctcccaaagtccatttgtacactagggataaatactgatccattgccagaggcctcatagactgcccaggcctcctaactgacacccatgttcagggggtctgggttggtgttatgctggtttcccagctatcagtctggggtccatgagctcccccttgttcaggtcagctgtttctgtgggtttctctagcctggtcttgacccctttgctcatcactcctctctctctacaactggattccaggagttcagctcagtgcttagctgtggatctctgcttctgcttccatcagctactgaatgaaggctctaggatggcatataaagtagtgatcaatctcattataggggaaggacatttaaggtagcctctccactattgcttagattcttagttggggtcatctttgtagatctctggacatttccctagtgccagatttctctttagacctataatggctccctctattatggtaccactttcttgcagaatagaggaaagcaagaaaagggttgattctttcaaaggaaggcatgtgtggagaagtttacactgaaagcctcaaactccctttactattactacttaagtttatttttagttgtattttttatccttttggagtaactgctatcctacaaacaggcagaaacaagtgtgtttcataaatgacaaaaccagtcagtaatataactgtggcttattagctcccaagatgggagttaccatgtatcgaatcacagttttaaatgggcatagcaaaggacttggaaatagcttcatctgtggctgacagctagggtaaaccataaagtttcccatcccttcttacggtgcagctcagaaacagagtacacacctccactacactgcattagagcctttctttttgattcctagcctttatctcatttcagactagaatttaaatggctttcatcatgtcctaggtttaattatatctccaggtttgaaccattttgtcaaagtaacagcctgagacgcatcctgctgcacagttccccttttatttttaccacagcaaagcaattcacttgttagcttctgtaattcccatacaagctgaaggatgaaatcaatacttggagaggacaataatgaaagaaacctgatccttttgtcagagagaaactttcatgactcatctgtcctacctagttttcttgctattaattttagcattattgttacttgtttaacaataattcagtgatccctcaaaccatactcttatttggtttacagatgcctccatatttttctgaaatgtacacacacacacacacacacacacacacacacacacacacacacacacacacacacacacacacacacagagagagagagagagagagagagagagagagagagttatttatcttttgtgaaattgttttattgttttattttatggattctggtgtgctcttttggtatgtgaaaataagtaataagaatgtcatggcatagtacaaaaagtagcaacagctggaataaccacatcaagtcttgagatgattaaaccaaggagaagtgaaaaagaccatattataggaaagactgtaactaaggttttaaaataagatgatgtctattgtaggtcacatataaaatcaatttgggaaacaaatataaattctgatgttcgaggcaaggtgaaacactgagatgatgaggacatcgagtgtaattacccctgtaacaagtgacatgctaaactgaaggaagtgccaattaccttgtctctttgaatttccaccggcgtattggggcatctccatggaacataatcttgggtattccactcaaaggcaggaaacctaactctgaacaatgacatcttgttccctaaatagtcttcaccaaggtctcccagcactgcagaaatgtttcctgattcaagaatgttctcattccttaccgatggcacagggaatgtttggaagtaggtaggaggacactagtttggtctgtgatagactccaaggtcacagaggatttgcactttcttctggaccatagtcttctatatacagatgatacccagcctatcctgttttcttcactgttggatcaaaagtatcatgagtgtgtatgtactatttgtccccgtgaaaatcctatagtcaacaaatagtatgagctataaacaatagatagaaccctgggaaatgtagactcatgaattatttacaagcataatactttctccaaagcatagatgtgaagagcctaagcaaaacagcaacaaaatcagagtcatttgggacacagacagatatagctgatttctccctagagcacaaagggtgatctaatacaagatgttattagtataattaaccacatcactaaattaatggaaagcataattcaattaatacaatacctattcatcctaaaaataagtgatttgttatttgaagaaaatatcatgtatgagattctttattggcttgttcattgttaattatacaaactaagggtttcactaagacacttccatacatgcatacaatatatttccatcattttcttatgctctctctccttcccttgtcttttcatatcccaaatagttctttttatacttttttctccatttatattcccttaaattccacatacaagagaaaatatgcagtgcttcttttgtgagactagctgattgcacttaaaaggatctcagctttagccattttcttgaaaatgatataattcattctttatgactgaagaaaacttcattgtgtatatgccacattttctttattcatccattctgaatatgagtctgggctgttccccaaatcttggctgtcatgcagagtataacagtaaacatgggtgtgctgatatccctgactgacttgtttagtattgctatagtagtgctggctgtcaacttgacacacataggaagagataaccttaagtgaggatttgcccccatcagattggcacgtagccagtgtgggggccttttcttgattgccaattgatgtaggagggctcagcccacttagagacgggctgtttaagaaaggtaactaaacaagctagaccaagcaagccagtaagcagcacccgtttatccacctctgcttcacttcctgactccatgctcttgttgtgagttccagattcaccttcccctgacggtagaccatgagctgtgggatgtaataattcttttcctccccaagttgctttccatcggtgttttatcatagcaatagaaactaaaccaggacaagtatgtacctatgaataacacagatggatcagatggtagttttattttaaaatgttcgaggaactcctgtacagattgccatagcagcttgactaatttaccttcctaccaaagtgcctgggttttccttccctttgcacttctttaccagcacttgacgctttgggaattcttgatggtggccatccttatgagggtaagatgaaacctcgatgtgattacatttttaattgttttagctgacttgcaaaatattggtttctctatgatattttatatgtatatatcgttgtactttgccaccattctctcctccatttctctccctcagtcctcttcctcctcactgccttcttccctatggatcatcccacagtctctgctctgtctgccttcatgtcacacacatatacatacacacatgcacacatgcatgctctcactcacacacatgtacattttaatctagattctgcatatgaccaaaaacatgctgtttgtttttccgagtcttgcttgttttctctgagcaagataatcaacagagaacatttctttctcaaacatctccacccaagaaattcaaaatcaaagcatactcaatgtctggttaaatcttgtttcttggtccataggtggtcctttccctatatcctcccatgggcaagggacaagtgttttgtctctgccttatttataaggatacaatcccattcacgagggctcagttcacaagtcctcatgacttcccaaggattttagttctcaatattgtacccttgtggatgaggattctcctccaatatataaatgtggagggtcatataagcaatcagaatacagttgaactgcttagacatagtttagcagttaggagcactggttgctctactgggaggacccaggttctagtcccagcatccccttggcagctcacaacaatctgtagctccagtcctggggatctgactcccactcatggcctctgagaacactgcatacatgccatgcacacacatacatgtaggcgaaataaccataaacataattaaaacaattcttgaaaatttaaaaaagagaataaaaacaaataaatggaagaattagttaacaattcaagtaagtatttactaggagagggaaggaacaagcaacaacctacaaggtgactaattttaagcagaagaatccaaagaaaatgctattttccatgtactaaattggaaaagcctgaaataagtgtggcaaaaagttaactagtattatatgcaaatatccattgtctaaaggaatttaaataatgtgaattctgtatcaatttgtcatccctctcccaggaagaaatccatggatgcatgaaccctgccttaagtaaaagagtgctcagagtggggaaatgaaatggcccaaatctttacctagggaggaacagagctggacatgtttttacaatgaaaaatattgtgccatgagatgattcatgaatcctaaaaacataatggttagtggagaaaagcgatctccagaatgctacatacattacgaatctgtgttatgactaacaaaaccaaagccaaggatgtatactttgaaaaaggcacacatcatactactccatctatgaaacattcagtaaaagactaaagagtcaaaggatcagggacttccagggtgtggggcagaaagggatgaaaacacagaatccagcactaaaactactctgttgattacaatggtggatgtgccataaaaatctatagcatgtacaaggagaaaacccagacatggtggtaaattctgttagagaattcactatgcacagtgagcttgggaacacacagcaagtcccaataccttttgattgttttacagcaaacctaaaaaccacacaaaagggagaggaggaagagaaggaggaagaggagaagtcattgttgttgctttattaaaatgaaagaaaatgaagaaagatttaaaagggaaacaaaggaagccaattctgagttctatgcttgcccgaacagaatttggaatagccatgcagtagcaatgcacaattcttttgtaaaggaaagcttggccagtccagttgcttctcaaatttaaacacaaaaggcactctcatatgtgattctgaaaacattgaaccgaggaagcttttgtggggaaaaatatctgctcaatatcaaaatccattcaactggagacacaacaaagaattgagatactggggagtcattgtaatacaaacaaaaccagcaacagaggggatcatagtcataaaacagataggaggtaactgctctaaaccttggccctccccaagaacatacaaaaaactccaaaaggaaaataaacaacaatgggtgtgacagaagaaggcatttatcctgcattttatagcagagcaacctatgtcaacaatgaaatcactacaaagatgggttatatacacacccccacacatgcacatacaacatacttgagccacttagtggttttcatgtagcaattttttacttcaaagacttttacaaatcattaccttggaaagttaagaaatatttttgtgaaaaatcaatgactcaattttgctccattttactttgtcttttgttaaatcaaagaaaactaatccctttccatttttgaaaatacagcattatcccatttttacagtcagggttccctctttccatttcatgtctgtaattctctatctgtgcagatgatcactgggcaaactggcaggacccagtagaggcttttgagctgattttttgcttgtttagatctctcatggtctttgaatgatttataacatgtttctttcttaatatgaaaagaaaacagccgtctcataataactttatatttgttaaatggagaaataagacatttgaaggttcttcggtccagtggatggatttaatgttgtagtttctcatggcatgacacccttaagaggcagaattctatttctgtatttatgtccctcacaagcttgtgcacacggctgatgctaagtaaatgttttttaaataaaattcgacactaatttctatttttcctttagattaaaaaacaatccaagaaaaaatacctctaagaaattatcattaataactgctctagggagattctctttggatttcactgactgtgtcttcacagaacaccttcctcaatgtgcagctcaacactgaatattggatagttagttgtcttttagatcttctctcagatgtattttcactaattcacttgatctatatttatagagcaacttcagtgggtagattatttctttgtgtccatggtggccaaaaagagtgcctcttgcataaaacaacttatatttcaataggagcacacctacaagaagaagatacatgtaccttttcagatgacaataaagtcatgaaaggataacacatttaagaggagaaaaatggcaagatagatggcttactgtgctcttggaagatgccctcctgataacatgacattagatctgaagccatgagtgaactgaaagaggaaggtatgtggatatcttggagaggaccctcacagacaaaatattcacttagtggagaatgcaggatcccagcatagacactagcctgagtagatgagtaaatgaagggaccatttaatgagatgaaaacatgggcaggttgagaggggtaggcgagtatgggacattaagggattggcctcagatatgttagtttgagatgcccattaagcaacataagttaagggctgggggaacaattcccagaggagtcagaggccaaagtctgttgaatgaagggttgggtgtatgagcgtgcacacttaactaaatttaacaatgtagaagctaaatcggatgtttccagttatcagagcagtgcaaatctcttcacatccaacagtcctctcctttgaaatataaaatatatctcaaaaacagttttctttcaaagcaactgtctttccaatttgtgtgcaggaagcaaaacttgtggggttgtctttgtgagtggccattacaaacagcacagcaggccttctctggagttttgaagagtggaggcacagcggttgccttgctgaaccctgtgctcactgacctagctgtgcacagcattccacacacaccatcaggatttttttcaggagaaaaggccctgcaggtgaagcgtcattctgtctttgggcccagagctttgacggcagccttgctcctgcagtgggttttcaatggagttaggaggacattctgccaattagtaaatggcagctgagtgcagggcaaactgtgccaaggctcaacagcaattgtaccaggagaccagaacactctgttccctcctctctcctgtggccttatcatcctcaaatgccagtgtttcctgttgatgacccatgaagctgtctcacagcctggacatagcctttctatggcccagcctcctgctccttgctgttgctggggttgtgggatcaatgggtttcagttacactggtggtgtggacagacaaacaacatgacacttaattttgagtataagttgctttaagtctttggatcaagaaaatgagtatgcctcacaaagatacagggatgtgcattacacaaaatttcaccaccagcctacctggtgtttcatgatattaaccttgtataataacaaacctatacaattaagtaatgtggagaatttaaaaatgaaatccaagtgtaaacaggtctcaaatttgactcatattcaattccagtctcactttctatgatcagagacaaacacaaatcatccccctatggctttgattaacccttcaaatgtaacttttcataattctctttcttgctggaatcttcacgtactcagtcacccatttcctccacatcatccccaaagactggcttccctatagatccctgggcagccaccacccctgtgcagacccacccccagaaatctcatcagaatttaaaccccaagagaagtggaaaaaatgtatagctcaataaaaaatgacaaaacaggtaaaaaaatatggaacaactatagtacaaaatattatttggcaatgaaaatgcaaaaaaagcccaatatataatataatgtgagagaaattaacaaaaaaatcataatggccaggctcagtttagacagaaataaaactttggagagtgggacttggtcagtagcaggcgttgtagctccctaggtgattcttacgtctaatcaaagacatgatccattgtattggttctttataagttatctgaatggaaacaggaaaaaggaactaagttggaatttggtactcatctgtttgacctttgagcataagaaaaaatttgtggaataagggcaaatatagtataaaattatgttggtaagaaataagcacacataattatggccaaaaaaagcctcactgtctaggtgaacaccacagcacctctaaacttcaggttgacatggatcgactcttaatgtatcaggtttaagaggcacggccttgaagaagtgattgagtcatgagatgccacccttatgttacagactcaatggggcttttgccaccttccctccttccatcccttctgtaacatgaggagcagcacttctcttgtgaagatgtcaccacaagacaccatgtcgataacagagggggtgaatgttcaccagctgatgacttaaacttggagtaccagatgccataactgtgagaaataatgttatgttatttgcaaattacctagtttgtggtattttatcattgctgctgaggtagactaaaatggggctctttattgaagtgaaaattactcaattttacaaacactgtagggaagaaggggcaggtgcactacctctgccagaccatgttgccatcacagttataattcagctaggctagtaattctcacccttccctcattagctccttcctttcttttgttccttctttttctatttctttctctcttgccctcccaagtcatcatttatgctaacaagtgaataaccctaaaaagacaaatttagaaggaacacaatgactataacaggtcattgtggttcctcccatgcaagcattgtaaaagtccaaaatgatgtttatttttccagctgcagctccttgatggaagctgcagtggtggcctatcaaatgtataatctatctgtatgaattaatgacagcacgaatttatttcccagttcaaaccaaccccatgccacttaccccagatcctgtcctcattacaggtttgtggggtgcttacttagcacagtcatgctagcctcattagatttgatttttagatgctttctttaggtatcatgctgtatttgtgtttttaatttttccatctttaaatttaaattagaaacaagattgttttacatgtcaatcctacttccctcaccctcccctccactccactcccctgtcccccactaacaccctacctatcccatacactttctgctcccgagggagagtgaggtcttccataagggggtcttcagagtctgtcatatcctttgggataaggcctgggccctcccccgtttgtctaggctgagggagtatccctctatgtgaaatgggctcccaaaatacattcctatgctagagttaagtactgatcaattacaagaggccccatagattctgaagcctcctcactgacacccacattcatggggtctggatcagttccatgctggtttcccagtgatcagtctgggggccaagagctcccacttgttcaggtcagctgtttctgtgggtttcaccaacctggtcttgtccactttgctcatcattcctccttctctgcaagtggattccagttcagttcaatgtttagctgttagtatctgcttctagttccatagctgctggatgaaggctgtaggatgacatataagttagtcatctatctcattattaggggcaggcatttgaggtaacctctccactgttgcttagatggttagttgggatcatccttgtagatctctggacatttccctagtgcctgatttctctttaaaaatatactggctccctctctgatggtatttcttattttgctctcatctattcttccccctacacaaccttcctgctcctttatgtcttcttcactcctcctcttctcctcttctcattctcctagctccctctcccctccctcaacgctcccaatttgctcaggagatcttgtccctttccctttctctgggggaccatgtatgtctctcttagaaaggacacagtcagcaaggcaagacggcagcacacagaatggtaaaagatattcaccaaccccatatcggacagagggctgatctccaaaatttacaaagaactcaagaagctagtttccaaaataccaaataatccaattaaaaagtggggtacagaactaaatggagaattctcaacagaggaatctaaaatggctgaaagacacataagaaagtgttcaacatccttagccatcagggaaatgcaattcaaaacaactctgagataccatcttactccagtcaggatggctaaaatcaaaaataccaatgttaacttatgctggagaggatgtggagaaaggggaacacttctccactactggtgggagtacaaacttgtacagccactttggaaatcagtatggcgattcctcaggaaaatgggaatgagtctacctcaagatccagcatttccactctcaggcatatacccaaaagaagtacattcatacaacaaagacatctgttcaactatatttatagcagcactatttgtaatagccagaacctggaagcaacctagatgcccctcaactgaagaatggatagagcaaatgtggtacatttacacaatggagtactactcagtggataaaaacaatggaatcttgaaatttgcaggcaaatgagtggaactagaactagaactagaagaaaccattctgagtgaggtaacccagtcacaaaaagacaaacatggtatacactcactcatatatggattttacatgtagagcaaaggattactagcctaccatccacaccactagagaagttaggcaacaaggaggacttatgatgtattcttaagaaacttgtggcacacccatctaccaacagtaatttcttagaaccctgtataaatctctgcattttgtgacctgcacatttaaacgcatggcttctacagcacagccacgctttaggaaaatgtccccttgctctatagtgctacaggttctcacactatatcctacacacacctgagatgtgcctgcaggatcctgacttgaagggtgagcatttcattttcccttgtaatcaggaatgccaaaccccctaagctgatgggagtaacttcacctaagctcagactcttgactcagaggcagcacatatccagtgattattctagatgtggccagaggtctagactgctatccctcagctcagaacaactacaaaagacaactccaacataagaagtttacatggtgtagctgaggcaaccttcacaactgtcttgcccatccacttctcaatagagactgatccccttcatgtttaggaggtctctcaagagaggaccttattcatggagccaggataacaggtgtggccccatggtcctaggaatgaatctctaaaatgaggagttgaggttaactactggatggtcattggaaacctcaataccagccccccacagtgagacatctccaccaacaaggctatgaatactattagttccacccactggtgacagagcattcagatatatgatcctatacacacaggtattggtggtattctcattcaacccagaagaataaaaagggcttcattgatggttgatcttcatatcttctgttgagatttcctattttgcttatttcaaatatgtttataattacatttaaatatatcttgccttataaacattactaaatatttctgccttttgtaaaagaaaaagaagggattcattgatcacttaggtttattagaataccactggattctcccttgctttccagaaaactctacatctaatataaggtgtatgtggtgactgtggaccttcaacacctttttctactcaatcacaaccatcacaagcatgtctgtctattcactctaagttgcattgacttctacacagccagaattccatggattatcacaatcattgcatgaaataggctgcaaggaacagcagacagacatactgctcatgtgccctctgctctagccttgaactatatatgcaaagcacaagttcaaacacatcaagttattaagaattccaaaatggaaacagtagggcattaaaccaaggccttgttaacataaagcattgtgtgattctatttattacatgaagcagatgccatatccatccaatttcaagtcctgtctaagccagacatgagagaaccagagagcaaaccaggaagcagctctcttccattgttctttaagtcactgcttgagttcctgccttatcttccctcagtagtgaactgtatctcactacataagccaaatcaatcctttcctcccttagttgctgttggtcagtgttttattatagcaccagaaagaaaaccagaatacttggtaaaatgcagactcggagattttatgtgagagtcacaccatagcctaggaatgtttattttatcagtaactccaaccatcaaaaaaattacaaattggaacatagtgagatgctgctacaacccccctaaaatagctaaaaaaacaaaaaccacacccacaggatacacagtttgataagaatatgaatataaaattagaatctgtacacttgtggcaggaaagtaaaattgtatagtcagtttggaaatacccttaaagttccttaaattttcaaacatggggttaccgggatcctactcttaaacatgagttggagaattcagaacaaatgtccattacttgtagtcaaatgccctcagaagcattcttcataataacctaatagtgaatgtggctgctgtcaactaacagaaataagtacaatgtggaataaagttaactcaaaaataaaaagaagtaagtgctgattcatgctccaacataaataaatcctagaacaatgcctgctaagtgaaacaactagtcataaacattacacattttataattcagttcatacaaaatgtcctaaataagtaggaaaggacagaaagtagaggagtggctgcttaaagctgagggagtgggagagaaattggataacagacttcttttgaggatggtagaagagttctgcagttgactgtgttggtcaccctgtgggcacactgtgtggtattaaccctataaatacattctgtgctattagccctgtgaacacattgtgtggtgttaaccctgtgtgtatactaaccattatcttttttaaaaccatgagttatgattgcactgtttattaaaaagttcctattatccatggaatgctatgctatatgctctccatataatatgatccataattcgcatgtcagcacaataatcctgcaatgatatgaatgccaacagtccaattatcacacttgacaaatgccactgcagctttttgagatcgatactatttcaaaataaacatcagaactgaaacaattctaatgattttcatgtcatgttcactgtgtgaagacaaatttagaagacagtctttggactgaaatgactttgaaaacatccagttttcttggctaagacctgaagagcagccccagcacagactgaaatggactcttaagagaacaagagtgtcaggaggaggaagcattcattacaagttcttcttcagaggcggtaagatgagctttaatttctccaggaagtagctcactcccttgttcctaagactcttctgggcccagctgcagtgcatggcatccccttttctaagcctgagtgaaatctctcctttcagctaaggacagggtgacaagaaacaagaagatccgactttgatttgggatgagttggcacctagaatttcatcttttccctgcagagcttgcagatggaccctataactgtttaattactcctgttctgtgggtcacgtgccatgtggatcctgtggaatgaagaggctaaagttctgtggacaaagacatgtccccaaaccctgcatgtcccttctgctctgtgtggaagatgaacagctccactcctaatctttcaccagaaactgaactctaaagtcttttacaaactttaacatgagtctggggagatagttaaatgggtaaaatccttgctatataagcatgatactctaagttcaaatctctagagtccaggtaaagccagacacaggcacagtggtgagtctgtaacaaaaggactcctgcagcgagatgggaggtggtgtaggagcattcccaaaagcttgtcaactttgcttgacatacacatcagcaagacaataagatgggaaacaaggactgtgctggttaggattttggtcaacttgacacaaacaagctagtgtctactgggaagaggaaactgcaactggaaaaaattgctcccatcagattggcctctaggcaagcctgtggggaattttcttgttataagtgatgaaggaggatccaaaccactgtgggcagtgtcacctgggactggtgaccctgggttgtataagatatcaggctgagcaagcccagaggagcaagccagtaagcattgagaactgctaacaagaccagattgttagtaaagactggagtttatcagctttccaaatgcttccaccagaggagggctcaagaccatcctcaaaaatctgttagattcattaactgtggagccagtggtgaaaggaaaatctagggccctctctagaattgctcccagatgcccattttagaggggctggaagattcctgtgagtggaaagcagtggagaccagaagtagaaaaggtcaacacaacaatccagtgatgtatcctgtgagtcaataggacctgctgatttggtcaagaacaagatgtgagtgaccacaatgcccaggaatatggtaccccaatcagaaaatttaattccagaagtacctggggcttaaaattcatgtagaagactttatgaatgggtttctttaagctgaggagtgtgctaaggcaatgaaaagcagtctatgatcacaggcagaatataacaacaacagccatcatttctctctgtaccagttaacaaatctgacctttgagagccctgatgaaataggagatgtttatctaccaatggatatttctttcatggtaggaggaccaagtggactgccttagaaggtttttttttttttttttttttttttttgtgtgtgtgtgtgtgtgtgtgtacatgctcaagtgtatgtggctaagtgtggagaccaggggtcaacatcaagagttcttctcaatcactttgcaccttactttctgagataagttctctactgaacttagaactcacagattcagctagactgactgccagcaatgcccaggcattctcctgtttctgcctccacagtactggaattaagaagtatgcaactatgccttctcttctggtgggttctaggggtcaaattcgagttctcatgtttgcagggcaatcccatacagactgaacctcttccaaaaacctgccttgaggttcttaaaatcatttcacttctcttaactcagtaaaacacactaaagccactttgttttgtttgctcttacttgggactgcctctgttctaatgtccttactctcatcatttatgtatcttttctattcataattcttgctctcatcaccaactcagttctagttcctcagaatgatcagcagacaacctccattgttctacttagcatctgcaatggctttctgggtctcctgattccatggcaacatgtacatccattgatagttttaactctgtggtactaaattccaacatgtgttctctcctccagtgctgtattttcgtcctataattttactctgtgttgatctataattttctctgtgaggctttaaattcaagatgtttgaatatatacctgaaaaccttttagacataagattaattctatgtactttgggtcattttggttcttgacaagtgcaggcagctatgcaggagtgagctgactgaaattacccactattaatcttttgcagactaacacgaccacattcatatctaaggataattgatgggtgtgttacaatgttcattaaaatgatgacccatcttgtcacttagactctgtcacatacccagcaacaaacctttagttttagtgttctatgacttctctttaaaagagttattaaggaatgaaaggctgaaagtgtttttcaattcagaaacatttttccttactctcctgaattgtttcgattctaggatattgaatttcattgggaattaatattttcaccaaaatgttccacatgagtttggaggatttgatggggacatggtttgttttgaaactgtcttatgtgcacactgttttattttaatgcaagtgaggatatgaatttatttcaaaaaccattcaaagtgatgcatgaaaatctatgctagagatgaggttagctaaagtgtttggttaataggagacatccaggtaagactgcagactacaatctgtcttggtgtgacctgataaaggagaagaatagagtctattccaaagagagaaggagacttggaaatttacaaagataagagcagagggatagttctgaaagaaagacaggcaactcaacaaaaactagtgtgctatgccagacatggcttagccatttagcttcccaacagggaaggggaaggagaggcctcatttgagaggtaaatgaggtccccctgctgaatagagactggcaggccttccctgatgacaagcatacaactcttgcatgtgataaatccaattagtcagcagtatagaggaatcccattttgtcactctatatgacttgaagggcagtggccaagtgacatctttagaaagaatctattatttaaagatctgctactctgaggactcagagcaggtgttaaaatcatgatttgggatgaatgtgtctaacctgttatagtcccaggtgagacacttgcccagcagatagttttggaaaccagaagatctgggatctcaaaagccaaaacatggtagctgcaggaggattggctcaggcaggcaaaggtgattcctgtcttggtggctaatagcagattttgccaactgagtgtaaggatggacttccatcattctgagctggattttgtcagatgtgccaacctctggagtcaccttagaactctgaagatccaacagaatatttatcatcctctacaccctctcctctagtacacctgtatttagtggttttgggtcatctgaagacaggtcctcataaacagattctcatgttattgtgacgtttcctctctggagacacatgccagctattttaaacactgcaaagggtagtatttggggagtttaacaagtgagagaatttatccaaaccacatatggtaatgcgtagccctcaaaggatgtgtatatgcaatgaagatgagtcagctgagcataaacagaaagcaaggcgtcatgcactcgatcattagctcctcactagtcttggttgtccaggcagtgtgactacctgcttgagttcctgctttgacttctctctccgtgatgaactgcaacctgtaatctgaataagccctttcctgcactacattattttttgtcaggatgtttcatcacatcaacaaattaacctaggtcacaggaactggagagatggcttggtacacaagagcatttgctgcacaagcacaaggaactgagttcaggtacttgaacctacatgaaaggacatttctacaaagccaagccttaccccaatgccaaaatcagataagaaaatgaaaacctgtagatcaatttactgatgagtatatatatgcaaataaaagtttgaaagctcaatttaagatctcattaagatgattgtaaaaaagaaaaagacaagtcaccaattcctatgggacagaggcattaagggcattgacccttggcatgtacatgctcatgccagtaatacactttgactagtacttcatctgattcctacacctccacagtgatgattccacagtggcgtcatcagtttctattatggccaattgaatataagtgatgtggggtacacaaagtatcctcatctgaaatgatgaaaccagactcatctctttgatcctgcataaaaatcaagtcagaatggatcaaagaccttcctgtaagacctaaaacagtaacactgctaggagaaaccacttcaacatgcagaagcaagtaacagttttctggaaaggactccaggaacacagaaaataatcctccccaaattgacaaatgaagttaaaaagcttctcctgaacagcagagggaactgcagtggagagacagattccaggatgagaaaaattcttatcaactccctatcagacaggaaattaatatctggagcatataaagaactgagaaaaaggagacacatgaaaaatcatttaatcaatacatgaattaacaaattagatagatctcaaaaaaggaattagaaatagccaataaatgcttggaaatgtgctcaacatccttagtcatcagagaaaggaaaattaaaactgctttgagatttcagcccgcccaagtcagaattagtacattcaaaaaattaagtgtcaacaggtattgatcagggtgtaagaggaatccatataaattgtttgctataatataaatggatgaagacactggacatcagtgtggaagtgtgagaagcagatgatgtacttagtagtatatattaatgatgtgagcagggacaagtcaagctacccaagggaattgatgaagccttcctctggtcccagtataagtatttatgaatggttgacaaatgtgtataaaaactagaaaccatagcttcctcctatcagctgactgcaacttgagatgctcctctacagagaactcccactgatactagctaatatggcttcttgtgctatcatttccaagttgtggctaggaggtaccctccatcagagcaagcacagtccatctgaccacagtttttctgtatgtgtgtatgtcatttcttcaatgtctgtcattcttcattcctcagcaccccaattagatttccagcaccaagccatgcaggagagcatagcatggaagttcctaaaacaaacaaacgatgtgtgatgctatgtaccactcctggatatatacccaaaagattctaaatcaacatacccacatcacagtggtaatttgcacatgtatgtatgtttatcattacactactgaatagtagagggaaatagacccaggctggatgtgtgttgacataagagaagttaaagaaaatatggtccatacacaaaaacaaaccttatttatcaagattcttctggtgaaggaggtggtggaaagaaataaagaaagaaaatgaaaatgaaattactacatatgcaagaaataggatggaaatcattgtgaagtaagccatccaaatgtaagctgaacaagaaggataccgatgaatatgccaaactgcacaggaaaagcccatgaggcctcagccctacacaaagaggtatagacaactgagtaaagctgggagtgagagaggaaaccctcctcaaggaagattacatcaaatgttcgttcattcctgaaaacgtacctataaacaacatggacttatatgggcgcaatacatattgggaaaatatatgtatatacaaatatttgtatgcatgcaataacaattaatgaaaaagaagacaggaagctgaaggagagtggcaaggggtataggggaaggtttggagggaggaaaggaagaaatgttgtacttaaaatacaatttcaaggcaggagagatggctcagcagataagatcattggctgctctgccagaggaccccaagttcaattcctgacacctgtctggcagctcgcaactgtaactccagttgcaggggactgtataccatcacacagacatacatgcaggcaaaccaccgttgtacacaaaataaaagtaaataaatcattttaaaaaataaaatctcaaaaaataaaaaaacctaaaaaaagtctcatgctggcttctccttttcttcattttttaaaaatgtttcatatgaacaattattgtcctattgttacttctggaatcatgtagtcacttgactatggtaggggttaatgtgtccctttcatctcagtaggggcctgtttagtaccttatagaaaacaaaagaaagaatgcttggtattggaggcactgggctttcagctgcttctctttttttctgaacacattagaaaggaaaatctaaccaaatgtggtgactaagtgtgaaaaaagaaatgtcaaagcactgaacgaaatccttttagatgttagccttgggaattctggcagggatcacctgtcttagttaaatgcgctacacaaaaccagctccctgaattacagagcagtatacgaccaaaaacattggagacatgaagtataagaccttaacttcatgttcccttgtccatttcgtggaaattttactgagcataaaagagatacattcagcaaataggtacataaactccattacagaatttatagacttaagagattttgttatagacgttatagatgataatgaaaataaagactcatgaaatgacatcagactatggattaaaaggcaaacctgggctagggcatgtagatcaattgataaactgcttagtgctgaagaatgacaatcctgagcacccatgtaaatgccaagtaagcatggcagcctacaggtaatgcaaaatttcagaaagacatgggattcctagagtaagctggctagcttgctttattcaaatcagcaaacttggggttcaactgagaggccccacctcagtgtacaaagtggatagaaagttgacagtgaatgagtcagacatctgatgtcagcatctggcagccccatgtacacacacacacacacatacacatacacacacacacacagagtgtgtgcatacataaacataggagaaaaaggcaaaccactctggtatggtcatctttaccttctgtatgaattgaatctctttaaagttctacctctacctagaatatacctaaaaatctaaaattaaaacctgtaagatacgacattctgtgagttgccatttagaagctaattcactgttaaaaccagaaaggaactccaagttgaagtgtaaagacaatgtatgactagagtttattgaatgagattttagttcaagactgaaggggctaacttcacatctgtcacccatgcatggttttctcatttttggctttttgtgttgaatttgtctcccaatactctatagaaggttgtaaaaacctgcaaactaatgtaactaagacttactgtttttcatttagtaatctcatagggttggcagagtccccactggctttctaaggacaagcctagaagtatcttttaaagagagaagaaagggggccaacaggaaacaataaattgtattggattatgccccaggctaccaagttaaatgaaccagtcagacaaggaaagagaaattagatggagccatttaaatataatgtataattatagtgtataaatataatgtataaacataatgtataattcttaaagagtattactttgttttctggtgatgtcgcccgctcctctggaagacaaagtggttgctttggttaaactacaggagttctagtccatgaaaagttacaggttttttttttgtatcacatactgctgtgaatgagaataaggaaatccattttgcttttgtagctacagatcaaaaaaatgatttgactgcacatctcatcagacaagatcatcatcctacaatgtctccagctctcagctttaatgtttttttttttcttcctgtagatttacataagatctctaatgttgttggaatgtttctttgtgtgtcttgtttctgaaggattcataagtagagtacaaaggaaaatcagattactaatgctactccatctatttttattcagtcagttttcctttgggctgagccactgcatttttgttcaggtttctccctcagagtctgagctaagtctattcatctcttttgtgcataaatagatctcctgtgggagattctgctaccaactggagaaagactgcagttttaagaatttcagaatagtttcagagactcggattgtccttgtagatgtggcatatctacggaattttgtcccctgaaattgttcaagacaaaggattcagttgaaaatatatctagtaagtttaactcagtgacttcaatttacattatgaatgcctcattgtaacctgttacagttgctgaagagttctgagctcttaaggttgatatttcccatacttgttgtcatattcttagacttagtcttcaaaaacagtttttgcttattctttacttaagaagcacagcaaaaattaaaatatttttcttagcattcatcattttattcaaccaatgttttcaaggacctcccccccccctttgtgatttgctttctctttaactttgaacactcctgaactgaagcctaggggtttccaggctgtgcacccataactcagagctggttatacacatctcagagtcaagagacaactctctgagagataaatggcccagcagaaggacaattaccactgaacaaaggaaagggaaactaaagaggtgttataatggcggcgttagatatatcgaacaaggcaagctgtcctggagacatagatcttccctgacatttccctttgatgatttatgatatggttatattgagtgtccttgtggccttatatgcaggagacttcgctttgattttctttttttaaagccttatttcattccacagaacacaatcaaagaaaaccagagaggcccctgcttaatgcaccacaccatttgagtgcagatccctttggtggaggaagaagggaaggtaggctggcaaatttatcaaaaggaacaatgataaacaacactagaccattctggcctctgctggagccctatcctttatcccccaacattatatggcattgtttcttgcagctagacaaggcagagtagagatctgcactaaaataccttgctttaaagagacgcagaagcaatgctcagtggtcagtgaacaggagattggaacacgtgttctgaaagagtccccttctgagcaggtctggggatcttagttgctgtcaccaatgaactatatatatgggcatgcatactgttaccagacctctgtgaagagaaaggtgattctaggggttggcatgacattgtttctcttctctaattttggcattattagacctgtcatcgcagaatgagtctaagacttcttcaatgtcaacatggtgcctgaagatggactccagttccagcctggaactctccttagcaggtgacaacttgatagttgacagttggaagcatattgttagctacatttggctttaactgtcacaataagcaagtggcatctggaagcaaccagagttgattggttagcagattctcagtaatttggggggttcagactggtgacaagtccctctctgtctactcctcttgagggctcttgaggtatagtgttccaactttgaaaactacttactattactgggagttttcaggtatacgagcatttattttctggactaatctgaggaatgcctgatgacttccaggttgtagtcctatgttttcacaactttgagacatgatcatctgaagtttgatgagcttagccttttttgcttataaaaatgctcaaagagttacggatgcatgatccaaagatcaagagtcagagtgaacaccaaggaacacaagagagacagaaaccaggtgacattttatagtacattcttttagctatggttcaaagacctttgctataaacagctggaatctagtctaagcagcacaaaggtcccttttctgaagttcattaacttcttcttctgtaatatctgtagcatgataaataaaatacacagagactgatattgtggttcaagttgaagatcagcaaagtaaagcagccagccactaattcttatctatacctcaaactgaaaggtgaacctggttccaccaaacttcaaactgtaatcccagactgctatgttctcctcaacatggctggaaaatcctagacttcattgtcgtcctatctacaatgtgactggagaatgaatgccagctttgagaccctgttcctgtcttaaatacctctcaatgagtcctgggattaaagttgtgagctctgctattcttttagactgagtcaatcgtgtgtaggcctgggtggtcttgaactcagagagatccatctgactttgtctcctgagtcctgagattaaaggtgtgtaccacaactgcctgacctctatagcttgtggctgactttgctttctgaatcctcaggcaagctttagtaaaccataaaaaatatatcaccacaattctctctttaggtaaaaacaacagggtgtgttggataggcaccattgtgtctgggtaatgaaaacagattaaacattgcattaaaaagaatccagatgctcaactgtaaattggaagaattggagtaaacattgaaataacttttgtcttcatcttctcagttgaattggttctttcctgaaataacaatactcagaagccctaagagataggcacggtcattaaatccactacaaaaactttcttagtagctggaagaatcagaacagtcagaattaaaaccccaaagtcatgtactacctattataagatgtaaaagtcagagattttcagtgtaacatacagcattactaaaagaaaaagaaaaagaaaaaagaaaagagttactccctaacaattcatcctgaagattcttcctttaaaaatcgaagcctaaactagacatattcttgcactctggactgctgctcatttttttaacttgaaagataatactcaagcaaaagactaagaaagttttttttttttaggacaaaaaagattgtttgctttaactgatatagaaatatcatgtccaaatatagtcctctatttaaaccaaaggaagaaatagttttgtcttaatgacctaatgaaacattatgaaggaaatcatcacatcacatgacttacaaagaaaatggcatctttcctccagatgaatagtagcatcacataatcataattcttagatcaggtcccccacatactgcccaccctcatcgctttggtaagaaattgtggatctgaaaaatgtttgtttttaatttcttctgtcttccaagttcaaagttccagtcagtggtttaacatctgaagtttgtatttctttttttattgagttaaagagaatgttttaacttgtttattgactcagtactatccagtcctattagtgtttcatttgatgctttcattggcttctttaatgtctggggttagtagattcttctagaggtagaccagaggcaagcatccgagagtaagtagactatttggaagtactcttaggaaacatcacgacagggtagaaaacaaatcatagaagtaaataaagccaataatcaccatcatcaaaattagagctgataccagggcattggttaccagtttgaaatgagataaatccagtgagattcagtattaataagcatttatagaaagtaaatatcgacatgatatataaatagaattgcactacattttacaaaattgcattgttaaacacaaatcaccagtatacttcaaaaactgatggtctgtgaaggaatatatagtattaacctctgcactaacttgtccaaagtgagcaagttatagtatttgctattatttgagctgctgttagcaaacatggacaaggcatccctcccaggcttctgtatgtatgtatggagctgatgaagaaacataggtattggcttcagaataaggatagaccatcagcaacatctgctacttcttgtttggttgattacaagttgttttacattcatcaagaaataatcttatgtccaagcatgaaccaaagggcatcaataggactaaaattccttggcatcctttaaaaactgttcctatctcctccttgaatttagaatttttaaactcttgcttagagaaaccccattcttaatgtgtttactatacaaagaacattgctactttgccacaagtttatcccatattattaggactatttgaagatttttaaaggtattcctgcttcctatggtgatagaagcccatggcaacactcccacagaagaacatctgtaaacttaaacaaatgcttttaaaaagtttaattgaaggttctggaaaagtaacatgaacaggcatgatttcaaaggagtcaaaacctagaaaatagtataggtttactattccctgctttgaaagagttggactcagggaggggctgtagctatgacaggatatttgtttctagtgggagacttgatgtcctttggcctgttttagctagtattcttattgctgtgatgaaacaccatgaccaaggcaagttataaaaggaaacatataattgggggtctgatgacagtttcagagggttagtccatgttcaccatggtagagattgtggtcctggagcaatagttgagggctcacaactgatctggaagttgcaggcagagagtaagggtgaggagacaacagagagagagagagagagagagagagagagagagagagagagagagagagagagagagagagagagacactggagtgagcaggacctgagcttttgaagccccaaagcccatccgtagtgacacaccttccccagcaaggtcacacctactccaataagtctatacctcttaatcctctccaaacatatccccttactggagactaagcatacaaacaaatgagcccataggggccgttctcattcaaatcaccacatggactaaaagaacagaattaaagctgtgatagccacagaggtaagaaagaaatcctcacacaaaaggcactcaggggaatggaatgtcaaatgtaaaaaaacagaaagactacagagttgcagtttgtggtaaaggactaacctaaaatttgacctgcctcctagcatagaaaatactaaggttttggcttaaatatagtgcactaaaaccaaagaattaacactatttaagaaatattataaaatctagattctctaaaatagcatattcataaggtctaggatatgatccaaaatgattcaacaccagttaaaaacagcacataaggaagcattactcataaaaggtgacagatgaatacaagttgcaagacaccccagatgttgagttaattggaaaggacctttaagtaagctgtcatgattatatccaatgatgaacaggaagtgaaaagtttactcctcaaagaacaaataagtatcctcgccccgaatccccagtctttctatttgaaggaagaaagcacacagttcaagcttactctaccaatctacacctagctaacataggtgtagaaccttcagagcacatgtgaaatgcaacatagaggcacaggctcactggatgaccaagaactcatcacaagactccagaatgcatttcatgccttcacaacctgctaccaaattattaactctctaagtatttcctctatctaatacatcttgtttggctatcaaaaatcacaatgaggacagaataaaatgaaaaaagaacaacaaatgaaaccccctccaaaaaactaaaccaccgctaacaacaacaaccacccaagaacacaacaaaaccccagttatagtagtcagtgaatgcatcaaatttacatatgtgagggttgttagaatgatacaatctgaaagttaaaactgcgttgcagtggtttgaatgagatgtgcccctgcaggctaacacatttgaactcgtggtcccgggttcatggtgctgtctgaggaagctatggaactttatgttgtggaaccttactggaggaagtgtgaccctaaggtggccttaccccacttctatttcaccttctgcttcttatatgtgggagatgagatttctttccataagttgcttttgatcctgatattttatctcagcaacaaatagtaaccagtacacgtgctaagggctgttgtgatgatgtacacagcatgtagaaataagtaatggaaactctagcaagcaaaagaaaaatacaaagaaagaacctataacagacatgaggcatgtttctgaggcatattattacttcaaacatggctgaggggaaagttcaagcttcagaatatcccaataaaaaacttcaaaaatcgaaaagaaatttttaaaagaaataagagaaagcctgaaatgaaaaacaggagggaatatccagaaactgcgggaccatgacaaaagacatcttccataagaactaggacatgaaagagaaaagaatagaagaatcgtttgaatcaataaaactaagagtttaccccacaaatattgtcaaacatcaaaccacagacccaggaagatcaaagaacacagaaaaggataaatgaaaaaacaaactaaacagagcaaacctaccctgagccatctcatctcacacttaaaagtcaacaatagagaaaaaaatcccaagggaagacagagcaacaaaacactttatttacagaggaacaagaatcacaattccatccaggaaaagtgcagtgaagtattatttagtgttgagggggagagactgttgtcacaatctgcatttcatgaaattgctccttcaaagtgaaagataaataagacgtgacttagacaaacaagaatggagaaaatttgttcctagtagagctgccttaccagaatcttccaagaagtgtttttcagagaaggaaaggatatgcatgggtggaagaacatcagagaatgagcaaatgaatgtgtgctggatagttttatatcaacttgatacaagatatagtcatcagagaagtagaactgcaattgagaaaacacctccataaagtcatggtgtaggcaaatttgttgggcatagtctatgtgctttaatgcctcagaagagcactgggagcatgctattagggctgcattgcatataccttagtagtaggtataggaaggagcatcttaaatccaggatgagggcccagtgacccttcccataccttcctcctatgtcaaatgtcaacagaccccatctggagggtcatttgcaagtagtcatggttgttctgataataatgataattagtccactcacaggacagtgattacccaaactaataggaaataagacagaagatgtgacgagacttctatctattaagtaaactcaattcattatgaaaaacctgccaagtaatctatatgcttatgaattcccctcaaaatctataaattacttaggaaaaaactgccaatcatatataggaaatagaagagtaaaaaaatctgtcaaatcatatttgagagctcagaagaacaaaacttggcaaatacaaaatgaacaatagttattatagacacattcacacaaaaattcttgacaaaatattatcaaatcaatgctcacaagaacacatcacaattgggtaaaattcctctcaggaacacaaagatgatagattaaggggaagtcaccaatcaattcaccttactaacagaataaaactgaggaaaatataccatcatcttaataggaacaaaaaggtatttacccaaatgcaatacacatttagaatactgccagaaaattacaaattctgtgtaaatccttcaatctaataaaggaaatttacagaacaacccctgaagctaaaatatttttgagtgaaatataagttctcctcccatcatattggaaacagaggatggataccttttctcctaccttttcaacactgcattggagtttttagtcaaggaagtaaattaaaaggcagaccaatcaaagaacaagtgagattatctctattaatagaggtcatgattgttcatatggaaaatccaaatgaatgtgataataattaccattgtcatggtaattaaaattagaagaaaatgagcagtaattaccaataaatacatactgtgaagtgctgtgatattttttaaccaaagttgcaaactagttaccaaggtgtgtttaattgaaccaattccaagtgaggactagtaaccctctgaagtgtacaagataacaagtttaagattgatatacagaagtcaatgctttttatattatcttaaaaaggaaaactaatttttgtaattctagtcatttacaacagaaaaacaccaaatgttccacagtgaatacaagactctgtactgaaaatagcagtagagtactgaagaaaacaaataaagggaagaaagatgtgttgtgttcacagattggaggattcaatattattacatgtcaaattcatccacaagttccacatacttatcgtggctaatttgatgaatcaacttgactaggttaacagatgttaacagctggggaaacatagttatagtgtgcttatgaaggcatttcttgcctatattagcatttgaatcagcatctaatacccaggtctgtccctaccactgtaggtaggcaccatccagtcccctggggctcagacaagataagaagacaagcaagggccaatcctcccttcacactgaacattgacatccccagttcacaggtgtgccgggtagttttgtcagcctgatacaagctagggtcatctgagaaggggggaacctcaaataaagttccatcattagtttagcctgtaagcaactctatgagggcactttcttgattaatgattaatgtgggagggcccaggtcatggtaggcagtgccacccttaggcaggtgggcctgagttgagtgagacttgggaagaaagacagtaagcagcatttctccatggtctctgcttctgtttctacctccaggttcctatttgaggtcatacccttacttcccttaatgatggaccttgtcggggaatcgtaagccaaacaaacaaacaaacaaacaaacaaaaaccctttcctcctcaaactactttcggtcatggtgtttgtcacagaaatacaaagaaaactagaaggcttctggatttcaggatttataccaacctttcactcacctgagattagatagatgatcaatgatgataatggagagagagagagagagagagagagagagagagagagagagagagagagagagagagagagaggaaagttggagactggttttgctattactctagataaccatagcataataacccaatgagctttttgatgatattgtcaaaagtacatgcaaatacaaatgaataaaactatccaagccaaagctgagaagatgtcacagtgaataaaaggctttcttacaagcatgaaaacctcagttcagattcttagtacccacatcaaagcctcagcagcttcagctctgggaggacagacacaggttctggattgcatggacttcttggtcatctagtctagccaaaagggtgagagactcttctcaaaaaatgaggccaagtgaagtcaacaaatgtcaacctccatcctttacacatgtaagcatagtcaagtacacatgttcatgcaccacacacacacacacacacacacacacacacacacacacacacacaacagagagagagagagagagagagagagagagagagagagagagatatgaatacatattttttattttttatcattacttctttgagaatctcatataatatattttggtcatagtcacacaaatccacattcttcccagatccataacccctgctctacatatccaactttgtgtcctcttttgcaaaacttaagttcagtttgtgctgaccatatactctagaacatgggacatttgggaagaggtggtgttctttaatggcacaacccctggtgagttgactacacaagatttttagggaagtatcaaagccaagtttagaatggaagggtgttggaagatatgaactatcataaactagttataagatttctcataaaacagtagtacatagaacaatttgatttggaaaaaaatgaatggaacagaatatagagctgaggaaatagaggctacacattcatactaaattaaattttgacacagtgtcaaggcaattcaatggggaaagatgttcctttcaacaaatggtacgggagtagcttgattatagaaaaaatgaacaccagtttttccttacactgcaaacagtaattaagctaaaagacaacttagtttccagggttaaaaatcagttgaaagtacaaaagatccagaagaaaacaggataaaatacttgtagcttcagagtaggcaaatattttcagttggaataaaaacaaacaagaattgtaagagaaaaaattgagcagttagattttcacaaacttaaggatattatctctttgaaaggccctaaaaaatgaaacaacagcaaggtatcttggtgacagaacacttgcttagaatgctgaatctctgggttcagtatccaacatcacagaaagaaagggtctgtgagatggctcagtagctgaagatgcttgcagcatgagactggcaacctgagtttgatccctggatcccatggaagaagggaactccacacaattgccctctgacttctatatacactccatggcacacctttccaatcacaaatattatgcacagtgcatatgacaaataagaaataaaaaagttttaaaggaagaaaatatttttgaaacttgtattttatatctcagcattggagatatggcatgtaatcataataaattctagcaactcattaagaatgaaaacagccgggcagtggtggcgcacgcctttaatcccagcactcgggaggcagaggcaggtggatctctgtgagttcgagaccagcctggtctacaagagcgagttccaggacagcctccaaagccacagggaaaccctgtctcaaaaaaccaaaaaaaaaaaaaaaagaatgaaaacaacccaataaaatatggacaaatatttcaacagacacagagaagttgtatgagtgggtattaatttccaaatgcacaaaacaatcaatcatagggaaaatggaaatttaaaccacaacatggtatatcacccctcagctgcccatgatataaccagtaaaccccaaaggactgaagttgtccaggatatgaacaactggattttgttaactatttgggaggatgaatctatggtttctgaagaagctgaagatggacttaaacggcaaagtcataccatttatctcccccaggcttttaaaataatcagctcaaaatctgacaaattcttaagtcactagcaggctaaagaagcagtttacagtagagagggtaaccttttcccattcttctcaagtgaataaataatagagtgatccactaactcccccacaaagtgttcctatcttgcctatttttcagtttaattctgtgattccttgttgtacctggaaaactacttaaggtagttagtttcctaaggcagctggcccgccacttttccacagccagcatgtgctcatagggttcctcttcctctactaccttacgaaattctacaaaatgatgtgcctttattggagtcctgctcagcgtccgggtaggaggaaaaaaaaatagtataggctgctctgtggagcatcacatggtgttcatcttgtcccccaagaagcagagtcaattatgccagtttttgctcctcagtattgtccttttgagttagtgcactaagtaggagttatcatcaaaagtcttatagggatcaaatgaagttgatatgagtcatggctatgtcaaaaacaccagtgtctcagactcatgggaacagcaaggccttccttcccctggtccaagtgcggatatcaacaaacaattgacttttggctaaaatcagtgtgtatagaaagtgtcaaccacaacttcctcctccttgatgactgcaccctggggctgttccttgacagagaccttctactgataactagctaactcagctcctgattcctgctgtacataataaactagatgagtttttgggctgctgctggtgcatatccattgcagagcacgacccacctctgtgttacttgtgcctgccatttcttcattccccattgctccagtcaggtcaggtgcaaagccctggaggtctaactagggattactagctcttggtttgaaaggaaattatgtgttgacactttcttaaaatgatgatggatattaaatgactgcaaatctaagattgctgttcattggttaataattctgagatggccttcagtaagataaggccttcaattctattttatttgatattcatccagaatctataatgtgcatgttcagtaagtattaatttattgtgcagtattgtatataaagtagaatttatttcaacagaacattgaagggccttttttttcctgttacttgtacactttcagttttgctccaggtgagtagagctgaataagtaactttattttaaacagaaagagttatttggagaaggcagggtcttcctggttttacaatctggacttttcaagtttctaaatataactttaggaacccttctgggaatctgcaaaggcaaggtaactcaaatatctttatttagtaactgaaatcacataggttgagttcaagtaacatctgcaagtgaccttttgatgtgctctggtttattattgtactgtagtacactggcagaatttaagtttaaagctacctattacactccttatttttgtatggtagatacataaagatgactttttaattttcattgatttatggtaggatacagagtgatggttctctttacggtgtgtgtgtgtgtgtgtgtgtgtgtgtgtgtgtgtatgtgtgtatgtgtgtgtgtgtgtgtgtgtgtgtttgtgtgtgtgtgtgtgtgtgtgtgtgtgtgtgtgtgtgtgtgtgactatatttttcttctgattcatctccttcaccatttttgtcttgtactcaacatgaccctcattggcttgtccacaaatagtgtccccttctgcttcatcctacaggtcttccatcctccttctgccaactcatcccttacaatctttccctctcatgattccctctctggtttccagaggttgacaattgtaatttgttagctgtcaaaggtcaatcaaggactgttatgcctccataaatctaggggctctttggacttctcaaataaggagaagtgtgaatccccagtttgttcagctcacattactgttccagtactgtactttgatgacttaattccattcttcagtattcttcacatagaaaacctttgcttctcatgtttgcagacccggttggcctcgaactcatagagattcacctgcctctgccttcccaagtgctgggattaaaggcatgtgccaccaatgcccagtcaggtctcaagcttttatttgtctgttttagtatcagagtgaacacccagagctaacacaggcagcaggaagtgaaggccatgggaggtgagtggtaagtaaatattgttgctttgtccttcaaaacacgctaaactagggggagtgacagtgtgaatgctacacaatgggactctaggaacgtgaagccacatgtttgatatttgtaaagcagagtcatttgtctcctcaataaaattagtctatgttctgcaggactttgttccaggatcttgaccttctacagttttacaggcatttcttgacatcatctaaaattcttgattgctcaacttctatttactgatagaacttacatgactctttgccccattcctcagaatacttatctcagtgtatccacaccaacaaagtaattctaactaggaccactcaagattgctatatctgtaaggttcttgaatcccagggggaaagagtcttatcctaatcactccattctcaggaaggcaagtgatggagggaggtgtttgaaatccctccgatgactctcatgcacattacataggaagatacctaaggtgtctgtctacccatgggtaccagtttgagtagtgtacagcacctctggcttagtaagacaaatatgtgtcttgccaagaatggcctcagaatggtaaatgcagcaacaaaattcactcatgaatcatatgtggatcctaatgtattttgtggtacaaatctaagaccacaaatttactgactgcatggtaagatctaggccaaccaatgctgtataatatgaccctgcctcaaaatacacacacacacacacacacacacacacacacacacacacacacacacacacagctatttgactgtctcatgagtaatattctaattactttaatcaaaatgtcctgaatttaaatgttcaagttcaatgttgtatttcaatatgataatctatactccataccttctttcttcagacttattgggataacagttactatgactcaagagtaaaataagaatacatgggcatggaaaaggcaagtcctgtaggaggataatagcaggcatttgtcttcttctttaactcagctcttaaactgtgggtcctgagatcctatgtgtcattggttaactaaatgcagcggttggaaaaaataatgtcagaagtaagaggtttcagaatgcacagcaatcaaaatccaattgaaaatcaacgcacgatgaacctgagatgtttctggcagacttgtccatgtggtgccacacagcttcgtggtagcccagaagaagagcctaccacatgaatgtttgtcatgctctcaactgtgcattcagttcacaatgcccatcacacttcctgaaacaccatgcctatatttgagactgttgtatatgatgaattagtgtttcaactacacatgcaaaattttctactattgcagaagctcaatggtttaattatgaaagccaaaaacttcatattttcatattctcattcctcagcatgtaagtataaaattagtgtgtcttttgctcatattgtatcagaatatttgcttctaaactttgctgcttaaagctcggcagtagtggggcatgcctttaatcccagcacttgggaggcagaaacaggcaaatctttgtaagtttgaggccagtctggtcaacagagtgagtttcagggcagccagggctgtacagagaaaccctgtctcaaataataataataataataataataataataataataataataataataatttgtttgagtcattgacttgagtttcactttttaaagaatttttaaatgagttacagcttgaaattagaacagaacttcatacaatttctgagatagcactaaatgtgcttctgtcattttgtattatgtttttatatacagcagcactcttagcattgtgaatataaaaagaaaacctcaaccaacactgaaaagcattaaaatttctctaggtccttcaggatcaaatattcaacaaggacttgtttctttaaagatggatattatttttaacttgtatatgaatatatgtttatgtgtacacatatgcgtacaggtgcttgaagaggccagagaagggaatcatatcccctggagctgaaggtataggaagttgtgagccacccaatatgagtgctgggaaccaaattccaagatgtaattctttatgcaaaaataaaaggctcatctaccccattaggatgcaagtttgctttcatctttaaaaaatagcaaactatatatgtaccaaggaattgttttaaactatgtttttgaggtctattagtctgcttttacaactattttatatatctatatattcataattgtgggtgagaaaagttcaatagttgcatctgtataaggacccactaggtcccatctcccttaactgggcagagcaggagtggatgactgcataggctttccagcatgaattctggttatataaattcaactagtactgactataatcctgaagacacagtcctgaatgccattttttttcccaaatgctgaaatctccaaagattgaaatgtctaaagtataaaatcctgaaagtcacaataccaaaggattaaaatccaggccactgaaacccagggtctgaatctcaaaaggacagttcgtgtgataccaaagctatgtaggaggagtagaaaagagagctgtaagggaagacgatctggttgtgtggtagaacaataaaaatcacttcagcataaaatgtgttcttggcattctttcttgctcatgaaatgccaggggctgttcatgcctcactggcctgaagaaggcagggaagttactggctggttttaaaattaattatgcacacagtaggataaggagatgtgtaggcaatggtgttgctgggcagtcagcagtactattttcaccaaatttacactctaaacttgaatgcaagtagaatattctaaatggcaaagaagcatgggcaagtctgacagaaacagctcgaatcctacaagaatttaaaagggacaggaccacatgatgaacttaacttcttcatagagtcatgacttgagcaaaagccagcaattattcactgtgaagccaaccttcagagtgaagtcaatggaagcacaagtcagccagctctccaaactgctctgagcaactgtctatagcccagctctgtagcacatgtctgcatatgcctagttttcttttttggttcattttcctcatttttaaagctgtctttttactatttaaaatcatcaatgtcactttttgataattcttaacacgtgatatttcatttttgcattacctccaatattagaagcataaactgtaaaaacttacagagttccaactcatttaatgctttccattttgccacctagttgatttaccctgttgctgctcctgattcctgcactgaaatcagaaccaacttctccaggcttccatctttccatcttttactaaagaccaatggctcctcaggatccctctaggttttccagatccctcaaccatgtggactaagcaattactgtgttcttaacttctccagtgtcagacaaacactgtgggactactccaacacctaagggtaccttagcctcaagaattaagcaactacaggattctcagcttcttaggtgtgaacaaaccattatatataatatatgagcatatatcatgtatgactatatataatgtatgaatacatattatatgtgaatatatgtatattcattcattctatccattcttttcccctaaccttgactaatacctgtgtctaatataattttattcacaggcttaaaagaaaagcaatgatatgagtgtggcttttaaattaccaccatgggcaaatctggaatatttcctctgattttcatataatacttaagcttctgtgttattatctggaaaaagtcacatgaaaaatattattttatctgattgattaaccattagaggttccattattaaataaattggttagaatgggtcccaagaagcaactgtcagtcactgtcatgtagactgttccctactaatatggaactactgtgatatggttaatattagccagtcactatttttaagaaaatagacatcaaggccagcctggtctacagagaaagttccaggacaggctccaaaactacacagacaaaccctgtcttgaatggttttcctttgctactgatcctctccatgaatgttaatggttgtgaactgagggtcatgttcaattcctattaaatttagaaagatccctcaggacatttatagaaaaactcatgggactacttagtcccatcaatgagtgatggatggacactttcctttgtaaactttactacttataaaatgtaaggactgggctttctaaagtcctctatgtgtagacattggccttggtacatgacatcatatgctcagttgcaacaggaaagcacttgctatgatagcccctcaagaaattacgtgaagaaggcttaatgtaacaagatcttaacaggcatgaagaacatatttagccatttcataaaatattctcctaggctcttttaaagattctgtcagtggataggtctaacaattaatatcctgttaaattaagactaccacgaacaaaagcatgtcttatctttaaaagagtatatgcatacagatagcaaaaaggaaatgagacacagatgtagaatagagcggaaggcttatttaatatgcactctcaaagtgcagtgcaatgataaaaagtcagatatctacaaaattgtaatgtaaatctgtttgatttgcaagcagcctgaaatacttgaaagtgagtactggtctcctgtgtctctgttgcttgggaaagaacaaagtgcacagctagggatcgaaccctggtatgaaagtgggtcagaacagggttacagctcatactcagcagatctgcagcctccataagaccatcgtgtccaccagggtgaaagaaaattggtgttgctttcctgttctccccaagaaggttggacaataagccgtcgtcctcccttcatcatcgtcccaatttctatgccttcttatttttgtaagctaactgaggaaaatattcttggtgtataaattcatctggtcctaagactgaaatggtagaagattaaattatcgatcaatgagagtgattaaagctccccaccctgtttttgtagtctttggtgaattgtatgacaagatgccactaaggaagctcactttaaagggatggccttcatgtggacaccaaagctagaaatttagtgacaaccatcagccggtatgatggcatttcacaaagggaaacgaattgcaagcccacctgcttctaatggctgttaattacgtgtgacaggctgatagcccagttacaagtgagaagggtgagttcttctggcctgcttctagtaccacaccacaaccaattataaagaaatgcattcaaacagcatgcctgtttttgtcaagagaaggaaaggagaaatgcagagtaattggggaatgaggcataagagaacagcaaatgataaaatgtggtgaacttttggaggatgggggaattacaatgaagcagtgtctcccagccccaggaccatcaaaagctaatggaaaaaaataggatgatattatacttttaatatcagcatctacttaattagaaaaaagaaaagcataaagtagcaccaattagctaatggcaaagcactgtcttcacctgctgacttacagaacacgtccttttcagaaaaaaaaaattgctgtgctatgtcagacatagcatggagatgctggcatttagttatgggaaaccaatcccaaatggcagcattttaacttggtgttttaaaactctccttttaaactagctgtgtgatgtttttgttgtgagataagtagagttaggttatttttctaataaaaaaaggttttgttaaatataaaatacaagtaaaataggggctggatgatggttctgcccttggagaggactcaattttcgtttcttgctccaacatcaggaacctcacaatcacctatgtgtaattccagttccaggcaatcaaagaccctcttctggcctccaagaacatccactcacaactacccacagtcccacgcagacaacacaagtatacatacaattaaaactaaaagaaaatcttaaaacataagatgaaataaataaaacctttgttctgtagtctcagaaactccagctgagatttgactggacatgtggatagtgactcatacaagctaaactcaccagaaactggtgaacaaacatgatggcaagttaataacttgctgtggcaaacacaattgtatcaaagaaggtattactgtgtttcccccatagcacctattttcttgctgttggaaagacaaatcacattcaaaagtttatctcatgagtaaggaagggaatacggacaatgacttctagctgcttcagaaattgaaagagtggtacacattcactcacagcaggtattggctagagccaggatgccttttgctgtgcatacaggattttggacattgttttgcgacacatttttttctttgccaactcttttttttttttacatttcacttctgcccttgatcttcttaaggtgtgtatgtttccttggagataacacagttctgtgagtgttaatattgtattgtcattgctgatacctgtcttttacactgcttctacctcctgaaagcacatttaatcctccatgtccatgggttctctttctgggaccagcagggtgagtgccacttggaacctgttggagatatagaatttcaggctccaccccttacaccaactgaatcagactgcattttaatgagggagccagagattaaatatttaaaatgtacttccttacctcttctgcatcatctttggacttttgctgttacaactggattaactcagttcaacactgaaggtgacctcacgtataaccttttcaggaccctacctatactttttgaatgtatatcttaggtctcaaagcaaaatactgatttcacattttcagaggccactttgctgtttgtagggatacaagttctcctgtattgggtcagaaactgaaccacaacgccccagtggtgtggctgagacatgcagacatagctgagacagccctatcattgaataattctcaatctaccacttagagattacagatagccaaggtcaaaattagaatactgatcctcagaacttcctcaagctgggtggagtctgaagcactgatgatccaggagccaaacatcatactccacgctggactcaccaactccacatcagctctgtagtctcctcctgaaaacaaatgctccctggaagaacggctgccagcttttagcaattcctattgtcttaactggagtcctgatatattttgggttaaattaacttattctgtgactgctaaggtcaactaaagaaatatgaagatatttctttatgaatagggttaaagagaacagaggaaagtatcaggcttggtggaaaatgtactttgcttccatcttgtactcacttgggagctcatgttcatgattgacagtcaccaaggtagattgactcttttcaatcttcacgaattgtatttataacccattaattgtttaaatttcttttttctagtcacaatctctgtaaattgtttgcactatgttttagattgaaataatttactttgagatttttctgatcatcacaccatggaatctgctgttctgaaggtgtgtgtgtgtgtgtgtgtgtgtgtgtgtgtgtgtgtgtgtacagtccctgtgctgcagcttttacacaggtatgaaacaagaacaagctacttggggaaaatgtttgtcaggtttaatcttgtttcatatttggagtgatactcactcaggatatataaactcacttaacagtgttgtttcccaatcttaaaaaaattcccagaaggaatcatgtaagaacagcacaaaatttactaataaaattaaaatcaatcatccttggaagacaaaactcaaaatgttttccaatcagaacaagtatagaagtagatattgcagtgaaggttaacttattttcttccttccaattgagtgcagtgtgttctgaaaagcttttgaccaaagttatcacacaagtttatgttttcttgatgaggaaggaatgtttatttggatatctgtaccattcttcacctttcctaagcgatgctattggcctcttgtttctcttttatagacacagattcttcaagctatccaaacaaatatgttttccatgctgatcattagtgggtatgtatcttgcttgactggggcagggctgaagttcatccatttgtctagaactatttgaaaatgaatggacacttggctattcaaacaacaccattcaaatgagacactagaggtagtcttgggaccagccacccaccccttgtaataatgaaaattactttctgctcaattaaaatacacatgtaaatctaaatagcaaataacatgtaataagtatcagtatcaaaatgaaagtgctgagatgtcaaaaaaaaaaaaaaacaagtgggagagtgtaatacattggggctaccaaagtggtccactgtcactgctgctgtgtacgggaagacgaaggaccagagaatgagagagattttcatcatggagcaagattccagaggcaaacttaaggaaactgtcttggggtcccttttctcactcttgctcctctacatccatcccatcccagcaataacaggagaagtgtattacattgaagacaggattaaatacataaccataatgtaatttgtatttccacttttatttttagtggctgagatcataaagctcatattttgaagttggtgtctcaattacaatttataactcccttggtcatctctcagtttctccaggagttgttcctagggtcttcaaggatgtgcaaatccatggatgctcaagtgtcttatataaaataatatggtgtctgcatagtctatgtcatcttatcagatacttcaaatcatctctagaccagttacgacccaatgcaatgtgatatacaaattgttggtctatgctgattgtaaaatgacaagaaaaatcagtaaaagtgcaattaaaaaatattctttaatcctattagttgagtcctcagatatggagttcccattgtagtttgacaattattctgagattgtctatttcagtattgtctatttctttttgtatttatactgtagcaaatctacacccaagtgaggcacatgggagaagaagtagcagggtataccaggcaaagaagcttgtgtcagttttcgttagtacagcagtgcccatccccatcccatacttatcaaacagtagaattgtttatttctgaagatccttgatcttgtccctaaccctgcttattgaagacaaaggtgagtctactattcaatttggacagtttctctagtaccttccagctccactcatttctcccttcaggacagttctatcttgccagaatggccctcctactgtggcagagagctgaggggaaatggaggaaacaggagcctggaaaaagcattaaaggaagcctttacgagttcaaaagatacagttgactgtggtgtgtgatggtagtgattagagcagagaaaaggacattggcacaaacattaatgagcttatacattactttttggtattcaagagtaagagaaagtaccagagtgtctctcaattgttttagattgtcatgtgctttttcttagtgctaaaatttcactctgagccacatgaattgtgagttttcctgcaatctcttccttcactaattttctctccttcttctggcctctctctatcttgcccttccttttatctagctcgctgcttttgtaaatgcccacgtagataaatctttctatagattacataatataagggctgtacatttagacatggtgatgaaaaaaaaggtgttatctcacacatctggtcttacaattttaccctcttgttgctttgtaccttatatttcatgtatgtagatagtcatctgtgatggttaacacaggcttctaacttggcaggttctggaatcacctaggaaatacatgtgagagattattcagacattgttagtcagagtgtgcctgggaagatgatctagatggagctgattgatgtgtgcataaccccctgaagtctgagaagcatcatctcatggaccggggtccacgatggatcgaaaaggagaaagtgagctgaacacaaatgttcatctctctggtcttcctgactgttgatgcagtatggccagctgccctcacttctgtcactgtgtcttcacaacctgatgaactgtagccttctcactttgagccaaaataaactcttccttcttggtcaggtattttgacaaggaaatgagaaacttaactatttgtcaaagaaatgagaaacataactaacacagatgctgtggtaaatctccccaggaagtgcttcatgcaaagtaacaaacacatcactctaaccttgccaagtctttcttgtccctgcttcattttctctggaaagaactcttacatcttttgagccttcctttgtcctaagctgaactgttgcccaaacccaaagtacaagtaaggatgctttccagtgggaggcaccagcatcccttcctcaactgtaagcctgcagtacaatttgtatgcaatcctttgggctaccagaacaaatcaccacaaatcagacagcttaaaacaacaaaagcatgcctgccagtggtggcactcacctttagtcccagcactcaagaggcagagacagcctgatctctgaatctgaagtaagcctggtctactacagactgagttctagggctgtgatccttctgaaatctttggaaataaagcctttttacatcccctactctatgatggctaccagtactcatctgtgctccttgaccagtgtctatatcactccaagtcccctgtctttgtatgacctttctttctgtgtgtctcttctctttctctctgcctatcacaaatcagtaattagatctccagtccatcacaatgcagtgtgacctcacctcaactttactaattacacaacaaaaacctctaatttgaaattagggttacattccagatagacatgggtctggtgaggtgtttctggggaggtataagtgagcccagtataccatgcggtgccatttacgacaagcacttctttccctgttatccaggcacactgtaatagcacaaggctgctgattccactaagtctctggatagaaatacaaggcatttaatctgcatgctgggaccatggccctggggtcctgacattagagtgtactgtacagcttgctctgacgcaccatctatacttatccagagaggcatttaccctacacactgtgggggatactgtggaactgtgctgcagcagcttgcattgctacagtaacagccttgaaaccccaccaagcagccagctatctagacaaagagcatcaactctaaggcataatccacttcatcttgtcatacaacacctccgagagcattcgcagatctccacgaggatggtttaaacatttttgtaataccaataaaggaagagaccagttcacagaagtcagtttgacttcttggtatctttctgtgcagatttcctgccttgcaaggcaagttcacaggactagattgaacttcaaggcaacaccagccaggggcagaagaaatgatatcttactgtgtgaactcctcaattgaaaagggcaactaaatcaaaacttttgaaatttacacaccagcaaaataagagaacatatttatgtatcttcttccatttccacgtatttgcaattatgcctggagaagtctcgcttcaatactgagcagcaactgcagtctggcctgcaggctgcattgctggtattttgtgttgatgcctcccctcataatatacttaaagacagaatgcccaaaagaacctcagttggatcataactaaaactagtcatcgaggaataatcccataagcttatggcagggattacaaacagaatgtctggtagaggctacataggtcataaagcaaaagaggtaggttttctggggatggagagctgggatcctgatgctatcagaaaccatctcttatgttcagtgggtgtcaatgtgagagtcactaccagtagcctttaaagttctttagagaaaaaaaaattctcacttttacataaaattcctctatttgaaagtgtagatgactgatgggtgttctcctaaaacatagttcaagggaaagaataataacatgtaaagcttgtcttctgcaagcatcgattctaaagagattttccatctcaagataaaaaagaaatggcctttacctgggaaggcttaaaacatccttcctagttttagacatagtcacaactggtctacattttacacaggtgaacctgggtcatactagtagctcaggcaccaacaaactcatacctttcagcatgtcattttcacttctggaactctagggtcagatgctctctgggcatcactgttgctctaattgatcctaggattctaagatcaagtaccttgtggcagctattgtgtctgtttctctacagtccctgggtctgggttgccactcagtaaatcctccattattcaattgaggactaagggaggaaatggctggactaatattagccctatactcaagaagaattagctaagtcccaatctgtgttccttcgaaccaacagcaaggccgggctgggacaggcagccttttttgtttttttttctgtttgtgaagtgctgaaaggaaacacatccacatgttggatgcaggttctgcgttgctttgctataagtgtagcttagtccctttgctacttgctcctcatcacttcctccagcctttaaatgattattctttacattacaatcctgaaccatatacatgcaagcaaccccaatcaatcccaatggatcaccaaaaaagaaacaaagatgaaaatatgagaagggcttggaaagaagacctcaagctggaaggagggggtaacaaggagtgaaaatggtcaaaattcattgtatgtattataaaattgtcaattttattaagtttaaaaagttatagagtacatggagaaaaatctaccctacttttactagacaatgactcttgcaaacttagtcatgtaccacaactaaaatcaagatacggggcgatcacatcagagtcatcatgcttgttttggacatccttatctgtctacagatgtttattactcagtattttccagagacttttctgtctgtgtctcatgttcagtatttttatcactgtgtctttaaacccactgatactttctgctacaataagttattatccttttaagtgcaacctaatggagttttcatttctgatatacaatgttcatacctaaagccacacctggaatatgttgcacatgctctgtacctctgcctagcttgctcacttattctttccttcttcacattcagttagagtaaccactttctgtatcatttctgttatgtctaagtcagtgcatatttttttctgtttataaggagtcatgttttcttttgttttgttacatgtctgataatttttattctattcttaattattaactctatggtgttggacattatatgagttccaaaattacccatggaatcatttctgggatcagtataagttacatgagaaattcttggatttcttttgaggtttttaggctttaagaaatggaatcagatgagtgtatttgttgggaagaattcctacacacacacacacacacacacacacacacacacacagaggagctcttgtctctctgattctatgggaccaaaatctgcaagtctaggtttcaaaatttcccacatgcacaccttaacgggggagggggagggccaaaacttgcctggggttcctctcctgccctgagcctaaaaatggctttttccaaatagaagagctggaggaatggtgggttcactgtgtcaactttgtctagttcagagagtataccacaaattttctttaaacaaatctaacatcagcaaacatttctttcatacagtttccagttatttcccttttgaatggggatggggtgagccgagaatataaatcaagtcttactccactgaggcaggggtcaggctgtagatcactttgattttaccagcctctcattctgtcacacttaggcagttcttgcaatatttttgctcctgtctcctgtctcctaaatacctagttccagcatctttccttgtcacattaccactagttctgaaataaatggaaaatggaagtaactttataatattatttctagtcaatgactacaggtaattcaccttttcaattgatctgttacttacgcactgctgtatcagctactgcttgagctgaatattgatcctggcacaaatgcgcagttcccagaggctgcctctgtgggtttacatctacttcttaacactacctctagcacttccactgtcctattcattcaagatcattatttcatccacatacatttgtacacttccaaaaactactgtggaacatccatgcacccagtttctgcagtgggtcctgggacttaaaatgtgagcaaagacaccgttgctgccatcatcatgaacctggtcatactgaatagactacatactacagtcaactctcagtttccatatctttgacaatacaactttgaatgtttttatatgttacaatgtgacagactatctgtgctgaagtattctgctaccgaaggctcaaaatgcagcttgaaattgttattcaagggctagagagatggctcagcagttaagatagcatactgcttttgcagcagacccaaatttaaatttccaccacccacattaggtggctcacaactacctataacacctcaggtttctgaagacatgggacttatgtgcacacacaggtgcactcacacgtgtgtgtgcacacacacacaattaaaactaaaactaaatgtttaaaaatattgttcagatacattacttacattatagctgaacaacaatacaggagaaagggaaaatgcattattgttctgaactaaattaggtgatgccctgcaaggtaacttctctgctgttccagaggcttgtttccaacaatccacacataagagcaggacaaaagtcaaacatggagctcacaaagagacattgcattaagttttacatgacacatgatcccaaagagtgatactaaaagcgatagcctactccatctcgtggaaggagttagttcaatcccactacctgttctgctagagcagaaaagggtgtctgaagtcattactacagccttcactcttctgatattgggtcttgaattaaaacgtggagacctatgatacctaatgagaaatttgatttcaagtgttgccgctagatcacagaaacaataaagtaagtgaattagacataccccaagggtgataaacctcagtaaaagtgcagggaggtaagactgtgctgttaccgcaacacctcatattcactgttgggggcaccagagaagcaggcatctgcctgcctcgatgttgttattagaacatgcttgagccaagaggaatagcaaatggcattatagacatgcacttacctttttacatatcaatcccacatctaattctctgtcctcaaaagatatcagaagaaaatacaaattgctactaggatatggctaaagcttgaatagctgggaaaccagcatgggattgatccagatccccggaatgtgggtgtcagtgaggagaccttggaaatctatgtagcctcttgtagtggatcagtacttatcgctaccataggaatggactttaggagcccatcccatatggagggatactccctgagcctagacacaagggggttgacctaggccctatcccaaagattttgacagactttgaagaccccccctatggaaggcctcaccttccctggagagcagaaagggtatgggatgggtagggtgttagttggggggacaggggagtaggggagggagaggggcctgggttgacatgtaaaataattttctttctattaaaaaagaaaaatttaaaaagcttgaatcttcgtttgtaatatcaaatgatttctacgtgaggtttaaagaaatgtatcagaaacaaaagaatgtaaaacacatgaaattaaaagaatgagaaaagatacattaaacaaatacatatcagaaaagggcttggaatggttagtctggaattatctaggcgacaagagaccaagcacacctgtgagggactattgagctctggtggtacctgtgagaggttgtgttgactagttcactgaggtacaaagactcattctcaaagtggacagcactaattacagacaggggtaggccagttcaggcatcccctctactattgctagtagtcttagctggggtcatccttgcagattattaggagttaccctagagccaagtttctccctaagcgcatagtagctctcttaattaaggtatctgtttcatttctcttccacagcatccatccccacctgggccatcttgttccctcctgttctcatcctcccttacttccttgccaccatccccctctggctcagtttgccctgtagggatcatctaatatctcttcccagggtgatccatgtgtaattcttagggtcttccttgttacctagcttctctggagctgtggacttgaatacccatcatcccttaattgatgcatccagacacagagacccacaaccaagaaccaggctgacctctgggaatccaggtgaaaagagagaggagggaatatatgagcaagggaggtcaagatcatgatggagaaatctacagagacagctgaaccaagcttgtggaaactcatgaactctagacctacaaactttgctgactccaggggtttgaattcgggcatccatatatgggaggcagttgtgaagcttgggctatcagaggggtccttggtagtaggaccatgatacaaacgtggtacatgagctagtttgttggagcccattccttagggtgggatgccatgctcagtcttaatgcatgggagagaggccagacccttccccaaactattatgccagactatgttgactcttcatgggagctcttacctgtgaggagaagtggactgggggtgggctaggggagaggtgaggaggaatgggaggaggttagggagggaaagctgtgtttggaatgtaaaatgaaatcaaaacaaaaagtggacagcactgtttcccttttgaagtaaaacagaagaatgagctgaacacattgagagctctctgcttcatggtgtagctgcaatgtgaccaactccttaaaccccttgagttgcttttgccaggttatctcaacacagcaagaagaaaagaaacagatgagtgggcaatgcatgtttcagggaaaacagaatttcatgcaaataatatgattttcacagattatcagtaagtgatggtgagactgtgactaattttaaagaaaatacagaggtatagcaattcttatggaaatcctctgctttgtaagctaattaaaaatacaacttttaaaaagaagactttgaacataggtaccctgcattggtggaaactgtttcccccagaagacatggattattaaataaaaatctaagtgcctgtttttgggtatcttcttatgagttattggtcaaagaggccccagaggccctcaaaataacataagctattgccattgcttctggttgcccatgataactagatagtatgatttattactaaagacacaatgtgctttggttgcagggaatagaggaatatatggaacagacctaaaaactacccccccccattgctgaatagcttttatggagccagaaggggctatatagctgctgggggttagaggaatcagtgccattactcaaaagtgagtgtggaatgatacaatattgacctgccaagcaagatatgcctgtttatacaataatggcatgaaagttttgagggtaaccaactactttcaaataagatctgaggcctgctccacaggtgggaactcttgggtgatatattgcaaacattgtcaataattcatttctgggcatgtcatgggccctaacagggaatccactactgttttttttttagctcaattgacatgtcaaactgcattttaaacatttatattcatactcatagattagtgctgcatgaaaagtatgatcttttatccaattggctatccatcagaagttccattgtcaaagatggtcagaacagaacagagaagcaactgtcaatcactgcagtgttgactgtcccctgatgtggaactactgtgatgctgctaatgtcatattctgtatatattatggttgttataccattaactcactgcagctacagttacccaaacaagactggcaaaggattaaaccagcaagatcagtcaacaatccaacaggaaatgctaattgaactcaatgtgttaacaaaaaagaaaaaaatgaagaccatatgaagatgggagggagatgtcttaggcaatgaaaaagggaagttgagttgagggtggacatgatcaagatgcattgaatacatgtatgaagttgtcaaagaataaattaaaatataaaataacatgaggtcaatgttccctcagttaagagcagtggtcctgtctaatggccttcagataatgaccaacatttttccagtgctcagactccaaatgaaacatcagccagtccttcctgggttttagcctactggtcccaagactgggactcttggcagccctgtcagttctccagcttgcagatttctgcagattctgaggtttaccagtatccagaatcacttaagctaatatttcatcttaactattttctggtatctgaagacccctgactcctatttacacctttttttttaatgagacaaaaacttttcacaaaaccaaagtgaaggtagtgataacatctattctggacagagagaaagtttcatttaagaggcacttgggacaataaaattcatgacaatgctgtctctgatgcttcatgtaggtgggaaacattaccaatctttaaaaggtatacattcatctggaagtcttcttgtttgtataatatacttcacaacttttttttcaattaaagttgggacttgaaagttattggtttaagtttgcatggatgtctaaaggagagctctgaacgggtgtcattgcctgatcctgtctgacttccacatctggaactgttgtcattgttttcacatttggagttcacaaaataaatggaattatggcttttgatctttctctacattcaattcatagtggaaaggagtgttttagtggcataggttcagcagatgcccaagtaggtggagcacaattgtgagtactaatgctcactctgaggtcatttcatgcccagaaagcagcaaagttggaaatatgtcttcccccaattggtaaatactgaaacacgtgtgtagggaagtatattcaatttgtttgaagttattttgagctagtcatgactcacaggagaagggtttaaaatcacaaaataactccatgccactatggtgtgtgaagttagatgctcccaaattgtcttcaaggctgagtgctccacagtccttggatactcttgtctgttttcccatgttgcctcttccttatttctgtacttggtctaaatccttaacagacacacagagcaaagagtgacctgaagggaggtgaactcttaaagccttgcccagtgatgtcctttccccagcaaagccgagttctaagcttccccagacagcactaccatccagggaccaagagttcaaatggtctttagggggacatttctcaaactgacacagatatctaacttcacaaagaattattcttataacttttgaattcagtccccagaaatggtctgcatgataaggtctttgttccttcctgtactttagtcttcaagaagcatattagagcaacttccatgacacattctagctccttacatggttcatgttccatgaaagtttattacaatgccatcccatttgcttatgttaattctactatggaatactcaaggcaaagtttaacatttcttttagtcatgctctagaaagacagttaagtatctattggaattcttgtagaaggccacttacacatttctgaatgcctttacttaggaggtaggtggtgacccaactactccagagagataatcatctcttagttcctgtgtttctggggggtacagaagagcttatgtgggtactacttatattcaaggccataggaaatgttggggttcaagatccagaagtactctggaaggctttgtcctgaccctctggtcattgtatctgagagaatgattctgcctgtgtgatctttcttgtggaaggtatgatgctgcagttcacatgtggaatgcagtccagagtgaaggagcatgacaggaaactgggaagtgagacaaagtatcagggatgaatggtaaatactccagaactcataggcaaggtcacaagactgccactaagaatagtcagccctcaaggtgtggcagataggtcatttttcaaatgttaagtaacattagtgtttctaatattaccagaattctggtgaaaatctccatccccagctctattctattcattggtcacttttattttcccttgctccactctgataaagatttaaacagcatgacagtttctttgactcaaatgcaatagcatcctcggatgggcagaaaagaaatagaacaccctaaccctaaccctaaccctaaccctaaccctaaccctaaccctaaccccaaccccaacctggagggttggtggtgaacctgcctgtttggtttcagttgtttggatgactagggatttttgcctgtttaacttggtcactactaagtacacacaaaaaccataaaatttggtcgtagtgttgatttagaaagcaacagaagtgctagtagagttaaaagcgtcttacaaaaatatgtttgtactcaaagctgagaaatactgtgaaccaaaagactgtcacttgtctttgactataaatctaatacactaggaagggcatcaaattgttcagctatagttacacataacacataacaccatcctctctgaggagttatttcaaactcttttatataatattcattacaagttaattatctctgacaactaactagggaaatatgttaatctgggaagacagacttctgtcttggaagaagcaactgttgggttctcccatatgagtttaggaatgatttcattaaggttcagtagtggttcgcaagctgatgtttagatgcttttgaaacactgtatggttgttccctttatctaccaaataagtcccttgagtaatcattacagagtaagcaatcatgggggacaatgaaactgaacttattttgtgttttgattacctttattattattagtcttcccatgaaaggccttgaaagtctaaatttttctcaggaatagaatgagagtaaatattatccatttgtacagagacacaaatataaaagtaacaaatgcttcaaagaaaccaaagacaacttggcccatgggaagtttgtcttcttgtcaaaggcctatagattaggcttgctacattaaaatcaaataatggatatttcagttgaggggatattgaaagtagtgttatatttctacattccatgcataaaacatcagcaaacaagttggtgattgctgaacagttgtttcttttgatggagactttgcaagtgtgtcctgttgctttgcaattctcctgggaagagcaatagacatgatgaatgtctacgctgagctaattcttgtaacagtgatctgtcagtagactccagccctttcactcatgaacttcaaggcatcacatgacttctgtcaaaatctgagcaaccccatttgagatactagaaccggcagaaacacttcttcctggagataaaaacagaagagaaatcatcgaaatgacttgaaatgtggttgtcagagtttcctggacagtctgcaaacagctgctgtcagcctatcccctctttctcaacaccagttccatccaaggctaagtcttcaggatggacaaaatggaaaaacagatttttttttatatctcactacatatatttgtgaaataaccttgactgattaaaaacatgaatgtaaatactattcaatgataaaatgtctaagagctagaaggggcctgaaatatcatttttccctaaagaaactgaccaaaaggctcttaaattgcttactgtcagaagaagaggcctggagttcaaatcctcagaacctacatatatgccagctggtcatggcagtctacctgtaattccagccttggaaagtggagactggtgatctccaaaccaagccagctgatgtagtgagattagtcatatcagcaaactcgagtttgacagaaaggtggtacctaaaataataataataataataataataataataataataataataataatgtgaagaggatcaaggaacaaattttacatcaaccttggacctccacatgttcaaacacataggtgcacccatacacacacacactaacacctgtgcacatggatgcacaccacataccacatgaaaagaagaaaccaagcataagaagtaacataattgataaagaaccacccccccccgtgtgtgtgtgtgtgtgtgtgtgtgtgtgtgtgtgtgtgtgtgtgtgtgtgtatcatgaatcagactacgtagcatgtgaaaccttatctaaaaaagaaaataaatacataaataaataaataaacttattctcatcatgaaagtttcatctccaagacctaattacctcccagcacactgcagatttgggttttaatgtgatttgagaggagaacccattgtgacataggatagaatgctgtcatatgatatacagtattatgatatgttacagagtgttgtcatatggtatatagcactattggtataaagtcttctgatatggtacagagtgtagcgatgtagtgcatagagttgtgatattatatggagtgttacgacgcagtaacagggttgtgatatggtacagtctgctgtggtgtagtatggagtgttgccatatgatatggtagagtgttgtgatacagtgtagaatgttgtaatttttgtcattcaagacagtttatgacctagagttgagctcaagaagcctaggaaatgaataagaggccacaagtgagactctagaaacacataactggatccaggagtgaatagttacatatctaacctcccttctaggagtccacatgcatggacatctaattcacttatttatgctttaatctgcatgagatgcagcaagatcttaagtttcaaaggaaatgagggttttaaaaaatcaccttttccagatgtctctagaaaagaaaacattaaatgccaggatgattgtcagaaagtgatgcgagtttgtatgcctgggtctcctcctcagtaatgctgtaggttagtaagtacggcttcagatgctggaggtaaattctatggtcctatttctgcatcaaacgtttattgtttgtctacctaaaatgtgatttttatctttacactgaaattcccctgctttaaagaaaaagtggagcaaaggaataaatatagtaactacttcttgaaattgtgctaagtgttgagtgagttaatgtgtgtttcatgcatgattaaagtctgattggtagtataacagaaaatttctacacccactgtcccagctgcccctagaatcgatacaaccccaaagtattcgtcaacacagcaaactgagttaataggaaaaggagtgctagctagctttcttttctcattgctgcttctccagattctttctaaaaattctttcttaggaaagacacttgaggttttgtatccctaccagagagaaagcatgagagcagtgttaacgttccaatgagtagtatgtgtccttattcatcatcagcaaacatggccaagtgatatattttggacacgaaggtgtgaaacaaagtcatctttatgtttacaaacagaaacttgaatggctatttcctggttacatgatctctctctctctctctctctctctctctccaataggtcaattagggcaacctggataacacaggccactgataacaactagatggcttacagacatagctagggtgcaactgtcataggcaaggagcaaacctttgtgtaagcccaccaagaatctagagttgtcagttcactataatttccctaattagttgacacaacaaggatagagaagagtgctagttgggggcacaggcagatattgactattggagagaaggaagacatcatctcagactggaaaaaactataatgtttagagtcaccttgcctctttgccttatacctgtcatttcctaggacaaaggaggtaaaaaaaaaatcagcagatttatttatttaagtggaaatggaggtggtagtttgtgtttctctctatatatgtgctcttggttcctaaccccaaaggccaccaccaaattggcatgactcagatttacctgagaagagagtctcagtgagggaatgtctacactgagttggtttgtaggcatgcctataggaactgttttccccaagttaactgatgtggaaagacccacagtacagtgagtcatggactcacatgagaaatagaaaaatatatcaaggaagagaacatggatacattcattttgctctttctttgattgtggatattatatgaccagcttttttcagttcctgccttgacttctccatagtggtggactttaacctgaaattggtaacagttctaccaaagtacaagtatgctatgattttccctctttgcttccctgatcctctatttaaaatatcttctgtaccctaatttcaccgaacagaccatataccattcctctaatattcctgaatatcaaaacttcttgatagagttgagagaatgacaaaatggttcagcggggaaaggcacttgctatcaaacatgatgatctgagttagatcctacgacccacaacaaggaagaagaaaatggccctgcatattgtcctcttgtctccatgtgcatgcagtgacatgtacacatgggtgcatgtgcccgcgtgcacacgcacacacacacacacacacacacacacacaaaagagagagagagagaaatagatgattgaaagaaagataaacaaacagatagacagatgataaataatagatagatgtaacattattgaaaagaaagtgcattctctctaatgttactatgttcaattctcacttacacctttatcccactgccctccctctgaagtgcctggtggccttcacatttcactcctgatgccccatgcctcatttttcaggaccattaacaacagttacacggtgctcagccacttagccttctgccagctcctccctttctgtccctcacacctgtgctagccccctctccttcccctgttcctttaccattggagagctcagagctcagtccttggatcacttcagcatgttttcttttcctccatttgctgatctcactgttttatagtttcagataactgctgtatgctgatgattctagaatattttttcttcaactgcagcttctccctggctcacatatacacagctgctctctcactagctccagaccgtgtcttactccttgaacttatccaaactaagaatgccagatgttactcatacatttgctctcccatatttcacagttctggaaaattctttctcctgatccctgcacccaacaccttagagtactactgaccgcccccccttcctctctttctcttatcccagtccactcaggagttctggagaatttatctcaaaattcagtcactgctctttgatggcccagtctactgccatctccaggattagatcactgcagcctcctagctggtgtccttgttttcattttccccatttgctgtatgagtgagttatcagcaaacagctggaaccaccctgctaactctagatgggatgctcaaaccctggtagaggctcatctctcagaagctgcttcacaatctggttggtgcacagcagggtccacatacaccctcattgcctctccagctcaagccctcattctttggccccatcttgttaaccatccttccctcttcaccacttcatcaggcacattcctgccttgggacctttccagtgcctcgtcagtccttttgcctcaaattctgtcccaaccattatctgcatgtttcacattaacctgaatccattagtcaaatatttccttgctggtgcccactgatctgcatagaatctagacagttccaaagttaaaactcttgctggcacccccggtgtcctgtaggttcccccgtccccccaactacaaatccaggggatttatctcataaatcaatcaggtctaatttaaagagatcctttaaacaattgtctgggttgctttagcaaaaatgaggggtggaagtctgcttctcaaggtatgtatcaaattctcaataaatactagctgagttgattaataggtgggtgaatgaataggtgggtagcctggatgctacaattcacaggaccagagccaaacaaagctgcttctctcagcttgactgacctgtgctgtgggaacacatttgtggtcaggagactatgcacttcccaagactggatcagatactggatgacccaaaggggaagcacctcctcacattttgtgcaagaggtgtctcagttacctcacccagccccagtgctgaccaagtgtgatggtcttttctttaaccgggcacacctaaccagagaaagtggcaacagaagaacaaggaaacacatctaaattatatcccccatgatctaaacacactccccctccatcttttgtggagttctagctttcagaacagggtcacaggtgggacaattcatttttttctgcagctcatgagcgcctttgagcaaaccactgtggtacccatatttttaaaggttatttgaatacattgcaaaatgtttttaaatcatatattacttttataaaacattacagtgtaattatttacttgcggctggtagacttaatattcaattgggttctgttctgttcagttcaattattaacactttgcttctcaaatatgcaaaggtcttttagttgtctaggaaactctttctgggcttcctgagttaatattcaatgactgctgagtgccaacagactgtaggcatgtccttcacacatccagcacggctggatgctggctgacatcacctccttgaatcagattataatggtgctgttttcttgagtttgaacacagagttggccaaaagaggacacccagaaaaatccattgtgtgacctactacctcagctgtataaaagtattactctcttcttggtacaaaggccatggagaaaaaccaacctttaggtactagtttattcatccacttgctagttttcttctcttgtagcagttgtaggaatatggaacttcaataaagaaagctcttttaccaaataaaagtccttctgatttctctgatgtatatcattttaccatgtgctttcatctgagttacgactggaaattgatatttaaagggccacagcatcataatcagtcataaaagcaatggcaataacttgaaaagcaggacttggtgcaggagtaaggacagatgtttctcttctgggccctctcctcaaactcaccctgtcactgtccgttgtggagaatagctcagttcagtttatcattgatcagaatgggtgactctggtgtgtacagtccttttactatggccctgtccatcattcgtctgtatcctgggtggtgactgaagaaaaggctgcctttcctggcctcatcttccacttcatagagtatgtctagtgtttgtagttgatgaaccagagatgctcagaaagactgtgtgggctgttgctgagagggtaccatgaagatgcacccagcaggagctggtgtttatacattcttttttatatccaaaactagaaaggggaggagggcacagtggggttatgatttacatttttattatttatttatacattaaacacagaatccctgaaaagagtattgcttccagctcacacagcaagcttcaatagtcaactgttgccagcacatctctctctgcagacttggcagctctgtcaccccaactgtcaagaaaatgagttcactttctacacaattccaggtatgtgagtcttttaaatggatgttcaccatagccccgtgcccacagcacagatctcagtgcacctgctgcatattgatctgcttggcctcttactaagtttatggctttgagcacatggcttgaggactataaatctcagcgttgttgtatgtacaataggggcaatggaagtactgctcttgcttggtttgtgtttggacctagtgcatgtacatgtggttcattagttggcagagtagatacggttgtcctttagtgggagcttggttccagcacccacgcagacgccaaatgtgcagatacccaagtcctttctcgaaaatggcatggtatttgcacttagcccactcacatcctccagtatacttttaatcattcccacatttgcttataatattgaatacaatgcaaatgctagcatgtacttttatactatatagtttaaggaataatgtcaagaaaagtctgttaagtccagatgcaattaggttttcttttctttctaatatttccaccccaccattggttgaacctgtagatatgaatcctgtggcatagagggacaagtattttcaccaaaggctacctgttaccattattttttagtggccccatagaaatatctgcttcccagttagttttcacaagtaaaatttcaaaaattttaatgagttttgaaaaattgtagtgagttctaaagatttcttggcttctggacaatttggggttgactgaagtagttgacggagggaagggtttaggtgcaagtattgatttgtgatgtgatgtcaggaagcaggatgagaaagtgaagcacaatgaggcgtgtgagcatcaggttcatagctgctgcagtcatgtgcagaagtcatcgcataccctcccacagaagccaattatgaaagtttcaggaatcacgtgagccagtgttcaacatggccattgttcaaatgaagtcaaattgataatgggattttgctgggcaaggaactgccaggcaatttcatcactgaacatcacgaaggtgcttactcaagcttagatggtactacctactgcatgtcaaagctttcccacagctgcttccagacaggtgggacattcactggcaggaccacccacattgcagatgtgtcctggtgatggtttccatacacagctctcctaaaggttccaagaattccttaactgcctcatccacttttctcattatagaacagaccctcattcttgaactgtgtaaggtactcagagattgcagtgatttgcagtgaatgatttttctctgcttagtttctcttgttgtggagggcacagtggagaggtagatgagcattccatattgtctctggtccaagtcattagaggtttctacccaggagttctttcttgaatatttatcagtccctttccttcagtgaagcatcctgaagagtctctgtcattgtgttcttgttcctcaagggtttagccatggtggcaggaggtacccctggccagaaagcaataactattattgactttccaccttcatggtccttaatcacttttaattttatttccagtttggctatttgacaccaactctgagtggcacattagctgcagactttgtacactctggcccatgattagcaagaagatggagattaaagcaagcatgagaaaatggtacagtaaagaaacatggtagatgtgagaaagagaaggctgcttttcacatatataaacaggggtgtgttctgaaataataaaaagtatagtactgtgtttttggtttttctgttttgtttttgagacagggtttctctgtggctttagaggatgtcctggaactagctcttgtagaccaggctggtctcaaacttacagagatccacctgcctctgcctcccgagtgctgggattaaaggcatgtgccaccactgcccagctaaacagaaatatagtactgtgaagatggaaggggttagatagtcctttattatcactatattataatgtgctgcatgtaattgtgttatagtacataatacatgctcttgtaaaaccagtaatatcaccacacacaccaggaatactgaattgtgatgtcacaatgatcatgacaccactaggtgaggggagctctccagaccccaatctaatgggaccactattgtataagaaggcgacattgactgaatcagcattatgtggaacatggctccatattgatcttcaattaaattagctcctaaaatgcaaagataccaagctggagatgtagtccagcaatacaatgcttagctggtatgtatgaagccttgaattcatgtcccagtatgctcaaaaaatataaaaaatattcatcgtcccatcagcacatggttagagagcatcctgcagatgtcttctagactccacatccagcaacatcacactaatgacttcatgttggcaatgctggagatcagcaaatattattaattggaggcttttattcagcacaatttaaatatttactagcattccactgcttatggttgctgtgacaactgagtttcaagcccactgagaatcttgatgggctgtggggaatgtgacagctcgactgactgccgttgagggagatgaagccttgataagttgtcttccatcaaatgagattttctgcagcgtcaataacttagattccctatccatagctagaaatcatccacagtcagaaactgggggctctagaatgtcccgcattgtgtactatatacatgggacggcaattgtaaatttttattttcaaagaagttttattttgaactacatgagatttacatggagcttctaaccatcactcagatatcttttttttcaatattaccattttacataaacatagcaaaattgccaaaatccagaaatcagggccaacaaaatgtctcagcaggtgaaagagattgttacccagtgagaaaatggacccctgagggttgtcccctgacctccacaagcatgcatgtacacacacatacatacactcttatacacacacatcacacatgaggataataattttaaaaatctggaacttaaaatggtacaagctattaattaaatcatatatcaactttaccagtcttctccttaaagcttatttttcatcccagcattatattgggtaactctacctgcaattgttatttctccaacttttaagagtcctttgctctttccatatcttcataatttcaacatgtctctatgtatcaagagtgcttattgtatcacagaagtagtatctttacagtgaaaaccaggtgaccccacttttatgtgtcaacctggctggaccaaagaatacttgtctacttggtcaaagactattctgagtgtataagagtatttcaggttgaagataacttttgagactgagtaaggtagattcctacaaatcaagagaaagaatgattttgtctgacctccttcaatatcatacattggtttccaaccttggactccaacaaaagcatggcctttgactcactactcccagagtagtactggttttcaggccattgaatttgagtagaagaagtatcactggctatcctgggtttctagcttactcagcctattaatctttgggtttatcagcctctgtggatatataagcattccttccttccttccttccttccttccttccttccttccttccttccttttccttccttccatctttttttccttccttccatccctccttccttccttccttcttttcccccatgttctttaaatagctgtgtttctctgagtaacactgactaatacaagtcctagtcaaatgaccaaggctaattagtatcactggtgataggatgtgttaacatcacaaaactcactccatgaaattctaggaagaacattccatctttatggtattcttcccccaaagtacataccctcatttttttttgtctgtgaaccataaaagccaagcttcctcctgaaattcatcttctccacttctgcatcattcagggcccgggtatcaagtcttctccttggataaaacagcgcatatgatgaacagactgtttaaaacacatctctatatctactgggctctattatatttctctcttcagttctacatccagtctccatgagccttagaccaaagcagccttaggctgtccactctagagataccagtgatcacccattgcagttcaaaactccaatggcatctttcccaaaagattaactggaatgccacagttaatgcaactggaagagacccagatctacatccagtggatactgctgagaatttctgcttatcaaaccaaactccattttagtgagtttagtcagaaagaagattggcttgttgctccccaacacctgctctcaggcaaagatccttccatcaaacacctcctggtatctgatgaacctgtgtctgtcttctcagcaccagctaccacacatggcattttacatgggtgatggtgatcacactcaggtccatatgcttgtgtagcaagcactttacagacagaaatatttctcttaccaccagagtgtttttggggggtggaggtcatagttcttttgaaacaggcttttggttcttgctatgcagacttggctggtcttgaactttctgtgtagcctaggctgacctcaaactcacgatcatcttcctgcttcagcctcctgggtgctgggttcaggcacttactttatgatagccatccataatccaaatactcattttgtcagaatccccaatgataaaataaatgtaacccttttcataatatttcagtaggtttgtttcttttcctttaagtgtgtgtgtgtgtgtgtgtgtgtgtgtgtgagagagagagagagagagagagagagagagagagagagagagagagagagagagagagagagagagcaggtgctcatgatagccagagaagttaaaggtgattatgaggcacccactgtggatgccaggaatcaaaccctgatcctctggaagaacatatgttctgaaccactgagatgtcagcctcaggtttgtctctttcatatgaagcactgtttgaaaactcagtttgacatcttccaggattcttgggcttgatgagagcctagcgcatgcctctattgtaaatggttttcttcctgcctgagtgcacaaagacttcattttcttttctttcttttttttgaaggggggtggtgagggaagtacaccaggatgtcaatctttgaaaagtcaaagctattcagatatcaggaggtgtttgatggaaggatcttgcctgagagcaggtgttggggagcagcaagccaatctagtcagcaagccccagatgccagtggcagacttctatctcagtgtataagctgagtggctcctgggaatgacacccaaggttgatttctagtctccaaaagcacgtatgagcacactcacacacgctcgtgcgggcgcaaacacacacacacacacacacacacacacacacacacacacacacacacacacacacacagaatcctttaaaaatattctaccacataatgctgtggagatcagaatgaataccatcaatggaaagagggagaggttactaccaccttctctcgtggacacatgagacagcatttttcaacaaacaatatttgaacttttgtttttctcttgtaatcccactgttctcaataatttttttccctcagtcagcaagcacacagagctcagtgacttacagctgcacgttggacaacagtcctgcctcatcccatttccccttgttcttcttgatttgtatgtggaattttcttttactatgttgggtatgtttgaggaaataactgaaatggcttttgcattaaaacgattggtagcatgaccttccagttgtccagatttcctcatcttgcccttgccctaacccttttgaaatgacttgctatggggtggctttcctgtgtgacttgtactatttttctcctctgtttctacccctctttcctaattttcagaataaagagggactttccagacatcctctaaaaattagagaaatatttttttcaataactcagtgtttcagtgtcttgggttccttttactggtgatcaagttgtgtgttggccaatgtgtccttcatctggtcatctctgatccttttgccctgacccccagcagtctaatacattctctgtacactagtgtgaagtgttcaagggtagtacagtaggccagagtttgaagttagcctctgtctaagacattcttgtttgtttccttaggaaatagtatcttaagaggtgatctggactttagcaatgaacatagctgcatgagaagtcattgcttctaattgtttcaaatagacagagccaagattatttcttaaactcatgctaataattccaattttaatacaagctacagtaattttactcactgtcatttgcttaatttgtatcacccttattttatactgagagtgctggttgataaggttacaagagatgataaaatttgaatattatgcaattactaagttgctttctttgtacacaaaacagttactacctaggaaaaactgtcaaaaaatatagatactggggctggagatacacctcagtgattaagaacacttgttgctattccagggcaccaaaatgttattcccagcacccaaaatcatgtagttcacagccaccttcacctccagctccaaaggagcttcagcttctgtgggcacctacagatactcacagacataaacaaataataatgtaaatacatgtaataagccaggcagtggtggcacatgtctttaatcctagcagaggcaggtggattcctgtgaacttgagtccaggctagtgtacagagaagttccagggcaggcttcaaggatacagaaaagaaaccctgtcccagtgtgtgtgtgtgtgtgtgtgtgtgtgtgtgtgtgtgtgtgtgtgtgtgtgtgtgtctgtgtctctgtgtctctatgtgtgtatttgcttatgatgtcctactttccaatatacacagcaaacatcacatgcacacacacacacacacacacacacacacacacacacacacaccttctggagttttcatatgttttattggtgtgtcttgtgaagcattttaattctctaaggagaatcttcttccattccttagtccctctttttttttgtaagtttataggagtgaggctttagtacagtctctggatcagtttgcaggaaatgagttttcctgagtgtgtagggggttagtcttagaacttcatgcattccacattctggaattgttctacttgtggtcggtgtgtttcaaaggcaggaggtatttcttcttagttccctggcccttcccagtccatttcaccctgaactatctctgcagcttgtttgtttcccagacactcctccctcaggacagcttttctctgaagagaagtccacagctatttctgagggtagcacagagctacccttaccctgctcacctgttacctcattcacccctgctactctctgtcatactgtgctgtaatgatcatttcacttctaatgccaaatagatgctaagccccagaattcagcatcctcggagctatcctcgttaatgtgaattgcaattggcacagctggtccttagcacccgacactggtcccctagttcaggtatcctcttgcttccttttcattttgtcacaagcgcttgctccttgagatgacataccgttcaatagttttctctaccaggtaatgcattcatatttggagaaataatttgtcacctacatgttgatcttgaacttgaacattacccatctgttttcacaggggcttgaggagatttgggcctaagacatgactacacaatcacccatttgatgagcagtgtgaatgagggtgcatcatgtctggactgcatcatggcattccagtgacacttcagtccatggttccagcctggaaaactcagacccacccataaaactgcctgccagttcaagcactagggataaattcctggtcccacacccagtggccccacagactgccaaagccccactgctgtcaccctcattcagaggccctagtttgatcctacatagataaaaaggggagggcctcaatcctgcctcagagtaatgtgccagcttcattaactccccatgggaagctttaccctctctgaggagtggatgggagtggggtggggggaaagtggggagagcaggagcaggggaaggagtaggaactgagattggtatgtaaaatgagaagatgttttaatataaaaaatgatttaaaaacttgcctgccaaaacttctcctcgggtatgcctcaaggcactcagaaacatatggaccttccaaaccaaaatttcatgtgccccccaactcaggaaactgcaaatgtgtcagtcatgttactcatactagaaactgaaactctccctgtttcttactcccaacatataactgctcaccaaatgctgtttccgtggaacatgtctatttctttccatcttcctacccagatcctagccatgactcacctgcaccaggcaaacagcttcctaatgggagtctctgcctctctacactgcacttaagctcactctttacgtcatgtagtgtgcctcaaatacaaatatggccgtctgtctacttttacaaaatagtcagctatcccaaatcctaacaaccaggcacggcttatcccttcagcctcatttctcccctctctccccttattacctactgttcagctccactgagttgttttcagcattttgaacaattcagattctatttcacattcatgatgtcatacaaatacctcttctgcatggagccatctggtctcactccacacctgactcctaatggagtcctcctcacctttccttctgctggtgaatgtgagtgggatttccatagaaaacaaccggacagcatactgctagcacagatattctacacagcaaattttaaagaaatcagtctcagatcagacttttctctgttgctgtccatgaaaaggactctagtgtgacttcacctgtctcttcagatcccagaagaatagaaagagctctggataagaatgaatggaggtgagaagtccatcacccattagctttgcttactctgaggctgtaagacaattactcactaattccagacttcaaggtctcacattgtcaaacacagactctatttttatctatgccatagaaatgttgaccaaaattgatgtgaagaattcatatataaccactttgaaacagccctccacagacattagactcagttagaatcagacaaaacacaatggcttatttctaaacatgcagtgtgagcagaagctttgtgctcactcctttttcagttgcaatgagaagctagttctaagtgctttcgagaacaatattaaatgttcgaactccaacagtttctatttcaagcctcagcttcctctgttttctgaaaataatacattggctaatcactagaggccgccagaagcctggctcctcccaaggcagagggttccatatccaaggcaggtcttcctgtgaagccagcttcacaagctttccctagctctagccatggtttcttccattattcgaagagttaatatttcaagtttcaggttattgtttaaaagaaaacatttatttttattatttttaggggtgtgtgtgtgtgtgtgtgtgtgtgtgtgtgtgtgtgtgtgtgtgtgtgtatgtgtgtgtgtgtgtaagtacaggtgtcttataacaggccctaagacctttgcacaattgatgttaggtgagaggcacctttctgaacatagaacccaacacataaacctgcccaaatggaaaaagagactgaatccatcatagaccagtccatagttcctggatggggaaagtccctgaatgtactaatctttgcttctgcagtttcactcctcactgttcttgctaacagaagtgtgttaacctatgactctaagggataaatggaccccaggaatgggaagtggcatgaactcctgagctaattgagagcatgagggtaggagagtgggtgctgccacaataagagcacaagaagaaaagtagaggagaagaaatggaggagcagagataattgagttgggggaagaatagaggagagagagcaggatgagagataccatatcagagggagccactataggtccaagaagagatctggaactagggagatctccagagacctacaaggatgacacgatctgacagtccgggcagtggaggagaggatggcctagaagcccttcccctagaatgagattgatgactactctctatgctatcctagagtcctcatccagtggctgatggaagcagagacagacatccacagaaatacactgagctgaaatctggaacctagttgaagagagggaggaatgaagaacaaaggggtctgtaccaggttggagaaacccacagaaacagttggcctgaaaaagggaaagcatatccacccagacgctctttgggaggccagtatgggactgatgcagccccctgatcatggatgccaattgggaggcccctgcactcctgggagcctccggaggtggactggcgtttggccctggtgtgtgtgggggggggctttgagagcccatcccacttgaagggatgttctctgtctctggacgcatggggaggggcctaggcccagcacaggaagatttggtggacttggtggagcccctgttgggggccctaccctgcctggggagtggtgggtggatggggtgcatggatggagaataaggggagggaaggagaaggggacttacatgtgaaacaagcctgttccctaacttgaattaataataataataataataataataataataataataataataataataataaaaagagaaacaaagataagggaaggtgaggctcagggtggcatgatttgtgcaagttccccatgcaatcagcagccaacaatacagactttctattcagctttaagagcatctggtataatctgagaaggccagaggcatcagaacaccctggagctagactcccaggcagctgtgaggcatgtcatgtaggtgttggaaaccgtctctgagttctccagaagaacagcacatgttcttaaccgtcgaaccatttctccacccctttatcaacatctttagaaacatcaaactactaaaacatgtgtgattatttatgtagtactcctagctttttatgaaatacaccaatgcacagtaggaaacagagccaggcttctaactctgctgcatgcttcaaggtttctcaagtatttatacaagagaacttataatgaaatcccatagttgtctccatactcgttcatggttttttgctaaataacaggctatcctaattatattacattaatgttatgtgtatgtgtgtgtgtttgcatgtgtgtaatacacacaaaattccctacttaaaaaaatcctaaatgactgctacatcctgtggaagtaatgtgtcacaatgaaatgagcataagatttgtatcagaaaggggtaggaaaatggaatctgtcattgctaattgaggggatttatccaggaagatattttgtgtatttgcatacaaatgctctcatctgtaaaaatcgtaatattgctgccccattagagagttagaaaggtcaattgaagtagagtgctacatcctaaaataactattttaggatgagctcaaccaaggtaagtgagctcctctggtcgggggaactgatgggctcccaggtctccctggtttccacctgtagccatgtggcaggtgttatttggttttactgatgtgtaacaagatgaataatttctctcacattgcaaccttttgcttggtatgccagtccactattcatctttgactgcacttcctttttatttatggagagaaggcaaggatcatgaaacagattaaaggatctaaagtaataaaaagtgtgccttcagcaggaggaaaagcaaatatcaattgatacagtccagtagatggacaagtctgtggctggtgctgagcctagctcacccacctcacctccaacattggacatgatatctactctgtgatgctactccaagggttgtaaatattgaatatggcttttattcttcttacaatattttatatgtttatatcaggtactatgagatgtttgccccagtaggcttttagcattttttatataagtgaatttgtttctctcttctaatctcactattttgatattgatatattattgttattaattatagttaccctactgtgccctagaactccagaatatatttgtggtatcaaacaataatgttgcacatttcctctctcccgagcctctgatatcataacagcactctcagcttctatgagattaactccatccagattccccttatgaataaggtaaagcagggtttgcattctggatgtggcttattttacttgatatatgtcctcctggtccgtccatgttgtccaaatagcaggatttaatactctttatctttccactttaatgctatccaatccccattcttggtagaattactcctttaatttttcttgtttgcctttgttctttctatcatatgctgtttcctgcgtacaggatgccctaccttcctctgtcccctggcattcccccacccatctaaatcacctcccaggttatgtcataagttatatttctgtgtaaagactctttgcatgctccaaatccacatggctatgcttccctctgtacttcttgaatccaatggacattttcacttgggattcttgggaagatgcaatactataacacatgtcacttagtccagttccctgtggttaaagcatataatgttcatgtaatttacaaatcatgatcattctcttccttgctcttattattattacttctacatgtaacatttgcttgtgtttccagtttgtttatgctatattctgtctgacagtagagaaaattgtatgcaatgttcctgtatggcagtatgcccttcctgtcatcatagagcatatgactctccttcagtgtaatcaaggtcttgctcagtgctcctggtagaaagagagtttcacgtttactgtcaaaaaattagaaagaaattttaacacatcctgcttgtggttgagatttaaaatttctcattctaagtggtatcttgagcatgcaatgtgattaaagaggattttctttgttgccttttctttattaaatcttttatagtaaattaacttttccatttacaaggtagtccctagatagcgagaatttgtgtggtggtacagacttggaaatcccaggctgtcttcacccagacttgagtctcatgtccagaattagtgaggcatcttgagagacccgtcccatcctttcaacactccaaggaccaggtggtctaggatatcaaactcagagcattgtatgtgtatggtgctgaataatttaaaaaagaaaaaaacagcctggctatattcatttagttaaagcatctggtctcttgagtttattgttcaagaactagtgtcacagatagagagatagttcatgtcctggatgacatttcttttatgagcctggttggtagggctggaattacagtttagtaagaaggtgccacattattctctggttcctgttctcttacttttgtgcatggagagaatacaaaaatgtggctttggctagaaaagatattacttctgttccagtcaacaatggaagagtgtgtctcctggaggctgctatgaaagtagagattggtctgctgcctgaaccttaggactcagcatgcttacatttggtaaagttctttcctatagaagttgctgaggagaaacacacaagtttgtccccaagtcacctctgtacttttgcaaggatctctcctctaaaactacatgtgtctcgggtaatccaaggagaagtaggcaccatatctacaggaggcagcggtgtgagatgagtaagaccatcttgagttaggtgtctctgagatataattccctccagtttttttgaagattgtagcctgatttgagtgtggaattaacaatccctatttgtaacacactagtagtgaaaaaagcttctcttgagtctatctggtaaatccttcagataaccatcggcaaaataaatgatgtttgacaaagaataaagcaatgatctgaattcatcaacagcatcaaggatgtaacttgttttctcactagatagcaagagagccttaccaaagagacacagacttgctttgttcagttcaataactgattatgttagcttagatattgtcttatttaacaagaaactcaattgcattgctttcattgttaaccagagataatttttgttattcagtctttgttaatcagcatttccattaatctgcttgtagaaaactttcttttaggccaccaaccagccccaaatcatgacatggagacatattaattagttttgaatgctcagccttagcttggctcttattttaatgtgtttctctttatctatgtttgcctccaggctttttacctttctttcttgatattttatttttcctgttgtctccatgtctggctgctggctgctggctgctggctgctggctgctggctgctggctgctggctgctggctgctggcttctttctggtcctgggcatgtccctctcattctcctccattctctcctctttctttcatgagcctagatttctcctatttattctctctgacagcagccccacctatctctctcctgcctaacaattggccatccagcttttctattagatcaatcaggtgccctaggcaagcaaggtgaaacaaatgcagcatatctttgcatcattaacaaaggcagcataaacaaatgcaacacatctttacacagttaaagtaatactcagtggcataaacaaatgtaacacatctccgcctacttaaaataatattcaacaacatctactactgttttggtttgtatattaggattacatcagatgaggcatctcatctctcctgttttggagcatgactaaagcccccccacactctacgttcccatgatgacttcacagtccctcaagtgtttgaactgagacaacaaccgaagtgactcactgaaagatgctgtttggcagaatgagcactcccactacagccactgccaccatgtttctcagtgcatcaaatgggagggaaatggaacttcttgtgaatgtacagtgtagtctttgtccttttgaactcatagggtggaagagacctctcaaaactgctctgactctgccccaacctctcaactaagaaaaagtcagtaaaagatgagttcatttaatgtttgctagttacttcaggaaagggaactataatctgcctccatggaagggtgtcttcctaactgctgggtctggtgatcccagtgggaagaatattgacttgctgtggggtggtgatgttgacagaaggtgaagaggcaatgggttttccgaaatgatgttcttgagaagtaggaacagtggctcttttcctcctttcatgctttctagaacgaggccacaaagagttcctgagcctatgtatggcatacagacacacacacacacacacacacacacacacacacacacacacacaaataagaattaaaagtaaccattaaaaattattataagtgacctgggcttcctatactctatttagcccagacaggcctggaacacactatgaagctcacactgaccttgatctcatgactgtcttcataatcaaccatgcctccaagtattaggattctgagtatgagtcaaaatgcccagctataagaaagatttgttcctgcaaatctatgtcttgtctttaggagaaaaaatgtttaattatagtccttatgtcacctcttacttcctctttacatcctactgtttccatttgatagaaattttactctatacttttgatcaaagagacaagctgcctattttttcatcagtcaaagaacatgacaactcactaggagtaacagaccaccagttcttctcaagttgcaggatctagatttctgataagtaagcacaaagttcatggttgtccttcactcaactcctgctttaggaggtagtgtggtaggttactattgggctacatgacacacaaaagacaggttgaaagccagacattgttattggaaatttaggggagttcccctagaatcctcacatgttaccagggaaactgggataccctcttgggttcttagtcttgttaatcgaagactaatcctgatctagttggtctacccatgactatggctggagctttgggcaaggcaagaggcaacacctacaaacagagggttccaaagctttctgaaggaactgcctcgatatgaaacaatgtatgagaaagttcaagtctaagaacactgacaagcaatggagattttggttgtggcaaggaggaggaggctgcaagccctgtgagagtgaaaagctacatcacaagccttctggtttaccggagacaactcagcaaaaagcttcccaggatcacaacaaacttcagaaattggattaaaatttgccctcaagaagactctgactgtaattggataagactgtatgcaatttatatcaaaggcattgtcaaaaccagcacagtgataagctgtcagcttgtgaagattaatttataatgatgaaattaatccaacaatatttaactcttatgagattatatgtactgaatacacaagaagaaacctgactcagagctgagtgtgatggctaaagcctgtaaatttagcacatgggaagctgtcatagaaagatcattgagttctaggcatttgttcatgacttcccaggaaaatctccctcaatgaatgttaaaaattggattaaatgatgtgaaatgtgtacatttgtaaggaacatgaccacccaagctgacttaagacggactgtcaaattataatagctaagaaacaaatagaaacatttgtcaaacctggcattctgatcagcaatccagtagtaaaggagtagaggaaggaggatcatgagttcacagccaacctgggtttcatagtgagctcaagaccagtctggcccatatgatgtgatcctattataaaattaattttctaccctatgaaatttattaacagagcacaagatgtccaaacagtattccctcctgcatatatattacatgatgtagtaggtagatataggaggagcctatatcttgaaataagggcacaatgtctcctgaatatgattgaggagaaaacttgttatagatatgaagaaaatttcagccagaggcatctggaagagtctatattgagccaggtcatgctgggaagggcaaaagagaggagagatggggacaagcagaccaagagatatccaaaaacagagccagccaggagccaagagactgcatagcttagttatataggggtcagagacttgagacgagaagtgcagcctctggcctggagagggttaaggtgggaggagcaggtaagacatgttggaaggagccacaggtactgagtggggcttgtcttgggtttctttgagacctgacaatttctaagtatatttcaatatattttaattttaaaataattaatcactttcctttacaaagaatgaagaagaataaaatgctaagggataattttagcaaaatgtacaaacttacattgtaaaggctacgtatcactgttgagagaacccagacttgtataaatgaaagggatttcattctgtaagtcagaatattaaacattgataagatgacaatatttcacaaattaatctgtagattctgcacaatcccaaatagaattccagctgttttgctttgatttgtctttcagaaataagctgatcccaaaatttgtgtgtaggtttaaggcacatatagtatccagagaaaagaaatctttaaaaggagaacaaattcagattcatattttccaattctaaaacttgcttcagatttatattagtcaggtctctgaggcactaagaagtagatcatcatgaagatcaacacaataagaactgaggataaagagagagcccattgtaccttttcatcactataatgaaatcgctgacctgtgctacttagaaaaagtgagtctgattcacagttctgaaacatagcataagttccatagagaaactctgctcttggctgcacctcctcatggaagatagcaatatcagaaaaaataaaatatcaaggaaggtacaagctgcccccaggagcaggaagccaggcccgttccttttgtaacagtcatgcaaaagaactcaagggtttaataagaactgctttgtgagagtatctcccagtgagataattcctactaaacctcaccactttaagagtctaacacgcatcaatagttctgacacatgaacctgggggaggggcatgcaaatcatgttcaagtcatatagcaccttgaataaatcttgcatagaccatctaatatagaatgaataatctttttaaataaatttggcaaatgtatatatttacaaaggtcttagttagggtttctacttctgtgaacagacatcatggcaacccttataaaaggagatatttaatggggtggcttacagtttcaggggtttagtccattatcttcatggtgagacatggctgtgtgcaggaagacagggtgttggagcccacagtcctatatattgatcagcaggcaacagaaagtgaactgagtgtggcttgaacatatatgagacctaaagtccgcctcacggtgacacacttcctccaacaaggccagaaatattgcaacttagccacacctcctaatagtgccattacctatgaacttatgggagccaattaaattcaaactaccacaatatacaaaaggatgtggttgaatgagggtgtgtctcaatgacagagcacatgccaaaaaaaggaagaaacaaagaaacaaaggaaggaagagagagagggggagagagggaggaagggaaggaagatggataggaagggcatggaaagagaaggagcaagagacagagtaggtgaagaacagagagaaaagaccagtgagacaaagagaggaaaagagggatggagggacagagggataaatggagggagggaaactgaatacttgccagacacaatatataacacttaatcccatggatcctaaactaaaatttaaaagattaaactacagtgattctcaatctgtggctgataacccctttggggatcacatatcagatgtgaaacctgcatatcaggtttcagcattacagttcatcacagtagcaaaattacacttatgaagtagctatgaaataattttatggttggtggtcagcaaaacatgaggaattgtattaaagagtttcagcattaggagatttgagaaccactggtttaggggaagcaaagacttagcctcctttaccactagacaatagctgcttagacattaagtctgaagtataagcaataaaacaaaaatagacgtattaaacttcattgaaattgaaacttttatatataaataaaataaaggtaagaagctaccagagaataggtatgttggttgggttttgttaacttgatagaaatctagatacagtcaggaagaaatcttaattgtaaaatgcctccataaaactggcctgtagacaaattttcttgtctaatgattgatatgggagggaccaacgcagtatgggtagcaccacccttggccatgttttcctggccataataaaatgcaggcagagcaaaccgtggggattaagacagtaggcagcattcttccatggattctgcttcagttctttcctctagtttccttccttcaggaccctacctccagatccctgtccagagttccttctttgtcttcattcagtggactgtgactcaaaacatgtaagccaaaaaaaaaaaaaaccaacaataacaacaaaaaactttcttccccaagttagctcttcatggtgttttttcacagaaataaaaactaagatgatgagaaaaatacatatcacatatctgataagtggattgcattaaaaatatataatgaacaatccaacaataaaaagacattaaaagatcaggagagacatttatccaagaatctacaagtggtaaatgagaaaatggaaaaaaaaaatgtgctgcttatcaatggacattaatgaaacagaaagcaaaccatatgacagaacttcatccccagtggaatggctagaatgacaattataatgagtgctgacaagagtatcactggacctctaacacattgctggtgagaacttgaaacagctgctttggaaatggtatgacaatcaaatcaaatttatatagacaagtgacacataaccttatagtttacccccaggtacccaagagatctgaaaatatgcattactatgcacacaaaagtttattagcaaataatggtagcattatttatagtttcaaaaaaatgtccacaggacaaagttccatcggctgataaactgataagatatagtacatcctttgcaaaggaatactgcttgtcaataaagagcaatccaagcaatatgcttcaagaaaacttgcatgtggtctgtgacatgaagggtgactaacaaatagtaactccattggtatggaccatccaggacaggtagatatttagagacaaagtgggactgagggtttgcatgaatattggatatgacagaaataatctgaatttatttgggcatggctaccctctttttcagtgtctctttggtcattatcaaataacagtcctcttcattgttcagaaagaagacagagtgaatattcagttttatttctttctgactttcagctgcaggtttctcttgacaacagaggacttaccaaacacacctgagttggtcatctactaatggtccctcccataacacatatcctgtgggtttggggctgaagctaaggatgggaagaagtgagactttgatgcattggaagacctctgtgaccaacatcaaatgccagtctttgggtaagcatattaagtttatctgaaatttaaaattcttaaaacattggtagttaatagaaaaaaaacaaaagaaataaatttatgtgaaatccttctaccggcctaataaggaattgcaaatggattttgaacacatgccaaaacaagctgattataatatccctttatttaccttgaaacagcccccctactgtgatgaatggtgacagtgacagcaacatataaagatgcatccaaggctacgaagagggacctgagagataaagccccttccaaacacagcagtgacaaaagacatctctgcaagtcactctgtaaagtggctgtaatgattcagagacattatttagcagtcaggaaaacattgctgagaaatgatggaagggtctggtgggagaaactgtcaaaggactggcatcaatcacagttaagtgtgtgtctctgctgattacatgcaccctgcagtgagcctgccaaacagatcttggatgccaccttgatgagctgatggagtctgtgaggatgactgatggagtggccctctgcatctgggactagaaggagagaggttgtcgttgctggagctttggacatgtggtgattctcaatgatcccacactaactccttgcagctgagtgtgcacaaggagaaagaggtatcctgtgacctggatttctgtgtgtgagtttatcttcagtaattgtagtaaaaccaatggtttggcatggctgaagtatcccaaaaacatacaaaaaagaacctttaacttttctgattaaaaaaaacctaataagtttaatagttattaaggttatttaataactgttcattgtattttctttttacattgtgatgaaatcagtaataaaatcaactgtgatatgacagcaatttctgtgctaaacattatatgaataattttagactaaacttctcaactagggagctatcaccaagaccatcatatagctaggaaaattgggtctggcaaaatgatttcactatgttgaagccatcagcttctaagtaatagactctgctggaccttaggcacctttgacccctatgactggcttctgcccacactgtgacatcaccttctcccaaaaggtactcagaaaggtctatatgctgggttggtaagagcttatgtatcccctagatgagaaaggcttccttggctttgaactcactactttgaacagccaagtttctcctggatattaaaacttagaaataacagttgttttcttgactggtttcttaaatttctccacagtttgactaaatctaatcagggtctattcaagtcctatattagccagaagagcaagaactcaatagctcacaaatttatcaactgcttatcatacccacagggtatagatcaatatgctgactagtaataaagttcaatcacacatgctagcatattatgtgattttaattgtcttggtagtcaccttcttttagcttcaaaagtgtgtgtgtgtgtgtgtgtgtgttgttgttgttgttgttgttgttgttgttgttgttgttgttgttgaataatctttttgttcactgtgtagatgtgccactactattggtttaataaaaagctgaatgaccaaaagtaaggcaggatatccaggcacagaggattctgggaagaagaagacagagacgccaggagtcgccagctgatggagagggaaaaagacataaacatgcaggagaagaagtaaagccatgagtcacatggcagtgcataggttagtagaaatagattgatttaagttataagagctaatcagaaacaagcctaagctacataccaagctttcataattaataataaatcttcattactggggagcgacagaaaaggtcaattacggtgtgtgttggtataatcatgtgttagaatgggcctgtgcatgccgaagtatgcatgtggaaatccgaggtcaacctctgttgtcagtcttcatgtttcaaacagggtgtcttgttgttctgtactgtgtatatcagtcttgtctggcctgaaagcttttggggattcttctgtccccacctcccatgtctgggaaggagtgctgggattgcagatacacactagcacatctggattcacattggttctggggaatggactcaggttctcacacttgagcaacaggatcttcacccacagagacacgtccatagcccccagtagccgcatttttaaaaagatgtattttatgtgtatgtgtttttgcctgcatgcatgtatatgcactgtgtgcatatagtactggcaaaggccagaaaagggcatcatatcctctggatcctgatgttcaggtagttgtgacacactatgtaggtattggaaactgaacctgaacctgggtcctgtgaaaaatagcaagtgctcttaactgttgagccatcttactagtcccaatagctatacttttcgaaatgaaagaaaaataaaactttaaaaaataatttactcattttgtatctaatttcccagtgtatccaaaggctatcatttcaacacataaccaatataagaagacagtattactttttttgcattatgtcagatatgtcaatttggactgaccatacctccagtggccagcatctaactgtgactgagtgtggtagcccatgttagtaatcctagctactaaggagactgcagcagagcacaacacactcaaaatcagtctgagaagtctagtaagactgtgtctcaaaataaaataaaataaaataaaataaaataaaataaaataaaataaagaggcaagaaaagaagagagggaaaaaagtgaaggaagaaattaagcaaggaaggaaggagaaggaaagggtaaaatgtttgtttggttggttggtttttggtttttcgagatagggtttctctgtattgctttgaaggttgtcctggaattcattctgtagaccaggctggcctagaatttatagagatccacctgcctctgcatcccaagtcctgggattaaagggttgcaccaccaatgcctggcttgggaagggtaaaaatgttaattgtgttcattggctactatatcagattgtctaattcttggtagttcttggtttaacctacctactttcctgtcttatgtcctatctcagcttcaactaatggtccacctgcccatttacccatcaactaactaatatattgatacactttctcaaagaacttcagtggatttgtcctttagagatctccacttcacctctccctgttaggcataggtaacttctaacacccagaaaccgactctaacctaaagatataactcagtcttctggctctagtagtctatccactgtcctggagatgctgtctggtcctgagaaaactattatctttctttcttggttaattatattttatttgctatgcacaaggggctcaattaattctcacagtgtaagcttatttaaaaacaaaactcaaatcagaagcctagacagtacccccaaatccttcttgtttgccctttacaatcatcgatacccagcccctagagaaatgattgtcctaacttttagaaaccacagattcaccttgattctttttgttattacataagcattcttaaaagcttattcttcttgacctcaaatcaagaactgactatgtcatatttgttttctttcagtcaggtatgtgagatccatccttgctggtcagtgcattgatatgggaactacattagaggttattaatccactccatggctggtagatttaagggattccctactatttgactgctgaaaactatgctttgttaaacttatgacaattatgccttatgatagataaaaattgtgtacgcatgtgtatacccagttaactataattgccaacaatggccccaaagatttgagttttcctaattcatgaaatatgtgaagttcaccttgtaagtagaagggccttgcagaagttgttaagttcaggaacttgaggtggagaggattttttttacaaataataagtgcatgtgtcctagaaagagagcaaagggggatttttgcacagagacttaaagaaagaggcaatgttaatggccaatagtcaccagaagttggaagaagccagcacctgattctcaaagtatccccagaggcagcataaccctgccacattttgattttaccctagtgatactgacttcaggcttctgacctttaaaactatgagagaacaaatttcttttgaaccacccactttgtgtgattcatttcagggcactattactgtgctaagtggttttcccaacagacaattatctatttaaaaggaaaaaaaaccagttctctaattgccaacagtattgaaatgcagggcatacactctgaagagtagggtttaaaaggaaattatatacagaataaaaatatttgcctgttgacaggtccatcttccttgtagatatttaaattatcataaagattcaagagaaaggattacaaaattctcaacaacactatgtactgaaggaccagtttatctataacttgagatgcacatatatgcatgctaagccttctgctcacacaccagtccagcacaacatcccccctctggttctgaatcagaagaaaacaaaatcaatttccagtgttctcaagctccacaaagttctcttatctcatatttcctacccaacactgatggtttaagtttttaaagtgtgtgtgtgtgtgtgtgtgtgtgtgtgtgtgtgtgtgtgtgtgtgtgtgtttatgaatggcatatgtgttcagatgcccatagataccagaagagtggattagatctcctggaactggagttacaaacacttgtgaacctcccctacctaggtgctgggaactgaaccccagtcctttgcaagagctttgaactgctgagccgtacctccccaatctcactgttgatggaaacataggaaaacaaataataagaaatcaaatggaaactagcgataatttacatcaatgaaacacatggttgttttctgttcagataaaaatggaagaacagaccaggaataaactcagacaggacatgcacctgcaaacacagcggtgagtgtgtaagttagaaaccattgtgggaactgcagggaagttggccttcaaggatcacctaaggaacttttaggaccaaatctaatccactttggaaataaacacagaatcaaggaagactgaataaaagagcattaaagagggaaaaaaatgaacatgaggcttgaaatgtgttatatatatatccttccctccaaaaaagaaaagaaacaaaaagctgaaccccaaactctcagaacccataaatgtgtagaaagtcaaaatcatgctggggtaggaggggtccttagcttaatatgactggagtgacaagaatgcttataagaggaaggatatatgttcacagagaagagaatgacattcgaagaccagcacagagaggaggtggaggcttggcctggaggtgtaccactgcagcccacagaagcaccaaactttggttaattctgagattggccagagaaaaaccaagttccaccagattgggcagaagtaaagaaagttttattaacatattaaatattgaccaagatggaacttggtcaggaccactcgtggaaatatcccatctggatgttgctgagacacttgttgtcagagattttatgaacaaaactcataggccattgtacattcccatgaggttttgtccttttttaagaactacaactcccagaataccaggtagttactttgggcaagtggggcttacaggttaacatagggtataacaagaatagttgaaaattctcccaaattagagcatgctaagttaaatagtagggaacacatggatcaaaagccatcataaaattaaaaggtttatctgtaaaaaaaatccagagagtgataaacataaatgtcaagatcatgacaactctgctaaaagtatggaagatgggtctggtgacaggctcacctttgaaaataaaaccattcatgtccagttgttcagatggaaagtagctaggcatgatggcatattcctgcaatgccagaacctgaggctggtgggggacataaggactttgacactattttgggatagactctgtttcacaaattgaaagataattgatactgacataagtaattttatcaagctaaataatggatgtacttactaaatacaataattcatgtgttaaatagtctataacaaaaggctagaagtgtcaaagtgaaaccttgctgttgattttggggacaatcagaccccatcctgtaggagctaagcctccatgtgtttctgtaaagaaattagaatagaaaaaaacttgtaaaaataattcatagaaaacacaaagctagtacctaggatacatgcaagagcagagaactctttcctggcttcagaaaagagctatgtcctaaacaagtttgctacctgcaaaactaattaagagacttacttcgagatacagaatgggaaagttttgggggaaagaatagagacaaaaaaaccttacttatattcaggcagaataataaaaggtaggcatttctaacaaagaattaattatccatttacccatgactcctttctttcagtattacatcccaagaaataatggaacagcacctgtagttcagtgagaaatgccttggcccaatagtccttgatagaaatgttcttcttacacagaaacaatagaaagatgttttagatatgaaatcccagagggaaactactcactcacattttcatgttggaaaataccaagatgcattccagtcaacccagccaaagtagtgacaggtgtagcccaactggaaattaccaaaaaggaccagaaatgttcaaaatttaaatgtctatgcagtattccaaaacctttattttaatggctaaagagatgactctgtagttaagagccctagctgctctttctgagaacttggatttgattccccacatgacagctcacaaccatctataactctagcctcagaggatctgactccctcttcgggcctccatggacactgtgagcaagtggtacacattcatacatggtgcaaaacacctacatatagaattaaaataaaatacttaatataaataaagtagtttttaaaaatataagtgcaaaaccaaaatataattacttcaggataagatacactgtatacaataatttgggactagtttctgtaaattaaaaaatacctagatcttacatatagacagaaaggtgactcatctaaaactgtatgtacatacagttatcacctgtggtgatattacctataaatatctaataaagatttcctgaaaatcagaatgcaaagctaaccacagtcattgaggctgggtggtggtagtgcatgccagcccagcccaggagaggtatagaagacaggcgctcagggtctcattcggtatttttgttgaggataggttttcccagccttagttagtggttgactgctttgcttatctgatcttcagcttgaaccccaatatctgtctctgggtttttattattcatgctaaaatcacctctatacttgcagcaaagggggaaacacccctttcttattcaactcttataattacataattggcaaaaaattcatatgatttctgatccccaaaatgtgggagaattctcactgacagctgtcattcaacccatacttttctgcaccaaagatcagctgtgtgttctccagaccagcatggtgctagttgagttactggaggtggcatcagatctcaccagaatctcagtcctaggagacttcccctccagtcagctagctttaattaacacacactcctgactgaggctataaataagaattctcacaactgtgtccttggctttgaataacttgctgaagcagcccaggaaacattttgtttacatttgtcagttttttagaaagactatgacaaacatacagacccacagggcaggggcttccaagtcagggaatcttttggggttttatggatgctcagtcttataggaatgatgtactacatcactagctagcaaggaccagcttaaccttaaccttctctcccaaaagatgggaaacaacctaggacctgacatccatcaatggatctttatcatatgaaaaacaacttatcaagtttctaagaattttagatttatatgccaggaaacaaagaaaaaaactatatgcttatgtcattaaacaacactgagacatagtctatgtattatgtatctagctatatgaaattatctatgtaactatcttctctcaatatatatggatattctttgtgagtgtttatacctttatctacttatatgtatattacctataaacgtgttcatactgttatctagctatataaatctataactcgagtatccttgttagattaccttttgaccttcctgataaccactgttgatgagaatcttacacaaccagccctctggctctcctaacctctccaagcagaccatcagcttggcgtcatgtggctgcaggaagcccagccccccatgagtccatatatgttccttgctctgacttaatcccctctatcaactctacaccttgactgtaccctataaatctcacgtctcttatgtacaaattcctgataatcatgtgttttgaataatcctttcagattgcaattctttaaaggagaaaaacaacattaaattagaacaaagcctctaaagtatcaaacgcaaagagaacaattacaataaccatccaaagtgaaagacttgaggctggagaaatggcttagcagttaagagcatacactgctcttgcagaggacctgaatctgggacccacagccaacctcaggcacctcacaactgcctgtaactttggttctagggaatccaaagccatcttctggcctccaaaaggcacctacacacacacacacacacacacacacacacacacacacacacacacacacacacacacattaaaaaattaaatatattttatttaaaaaagactcattcattgataacagacttttcagtaaaagtagaagccaggaataaaagaaagaacatctttgaatcaatgattgggaaatatttctcattgattccattcccactaacaatggatggtttggtgtgtcctttgaagacctatatatgaaaggcttagtattattggaggtggcaggaccctaggaggaggaagtgagtcagaagcagttaggttgcttggccttgaaggagacactaaaccccccaaacctatcttccagtcttatggcttcaagtccataaggagataagcagtttcctttcaccaggttctccctaccacaatacattgccttaccacacacccaagggcaataatatcatgggctaatacctctgagatcacaaacaaaaataaaccaatttcctcagatattttgtcacagcaatacaaacctaaccagtccttttggttaggtccccatttatccacatccttgacattaactacaccctggtaatttttaaatgtgccattttactgagtgtgaagtggtgtctcatcgggagtttgaatctcatttccctaatgatgcacagtgatgagcatcctgtcttatgcttgttggtcattctaatattttctttggataaattcccagtcaaactattgtctattttaaactagattatgatatgattattggctgaaaagaatttgtttcatatttgtatacacatatcagataactatcttgcacctatttttaccatgctataggctttttctttccaatttttgggggagaagggtcttggtgtctagcatgtgaaacacaaaagttttaactctgacaaagtaaaacatttattctttagttgcttgtgtgtttggtattgtacctaaatgaaatgcctagcctagtgtcaagaagacttttttcctatcttttgtctaaaatatcttttgtagcataagctctcacattgggtctttagtgcacttaaattgatttttgagtgtggtattaagtagggttcctatttaattcttttgcacatgtatgtctggtagtctcaacatttgttgaaaacactccacttttccacagtaatttattttggtagccttgtcaaaagtcccctggacacggaagtgaagtgcagtttgtgtactctctttttcattccatttacctttaggtttttcttgatgccagcacacaccgtctcagagactgagcctaggaagccttcagactctaattttgttctttctgtagattgttctcacttttctggtctacatgtaattttaagtttcaggatggaatttcagtttctgtaaaatgtcacattggaattaagaggaatcacactgaatctgaaggaatagcaatgtcttagggatgttaaactttccaattagtggacatgggatacctttatttcttgcagcctttttaaagattttgttacaccaagaaactgtgtcttgaaaagctaaaaacaaacaaaaaatatcttttgtgttactttacaaggctttgttcaatttatccttattttagtttctgaattcatatattttttcatcttcatgttgttcattgcttgtgtatagaagtataattcatttctgcatattttttgttttgggaatcttgcttaactatttgttttaattttcttttgtgtgtttaaaaatttctaaatggaaaaaaaattatatcatgtgcaaattgagtctacatccttgccaaggtgaagcttgtcttcctttcattctcctatctatttgtctgtctgtatgtatgtctttctttctttctttcgagactgggtgtcacacagtctaggttggcctcaaactcaatatgtatctgagaatggcctcaaactcctgttcctttgttttcatctcctaactgcttgggttacaggcatgcatcaccactcctaaccccttagtcctttttctattccttgtatatttggtcttgccagagcctccattacagcaattaaaatggaaaaatgggcactgaagagacagatcagtggttcagatcagttgctgctctttcggggcatatggtttcagttcccagtacccatgtcacatggtttagaacatcctgtgaccctagttccaagtgatctgaccatcatcaaatctacacacacatgagacagacaggcaaataaacattgaactctcaatctaaactctcagtgccaggcatggtaaatctcttttggaagtgccaatctcctgaaataatacaggctctgaaataattttgctcttagtgtcctctccaaacttgaaggccagaccctattgctgaacacaccacttactctagacactggactttaattaatcaaacaagaactgatcagggagtgtcctccctgaggactagctctcatagttccaaaaagagctatctatgcaagctaccaagggagaaaagcaaccaatggttttacccatgagccacaacaatgaccaacaaaacaagataccctcaatgatgcaacagtgaaactattatattgaggatagcaaacaactttctcatggaaattaaggcctactcaatatgagagaattcatgcctggtactgtaaatgtagagaatgaagtttataagatacacacgcacacacacacacacacacacacacacacacacacacacacacacacacacaccatagaggacaacctagaaatgccacattcctaaatcagcataatttctaactgaatactaaatgttcttatacacacagttaagtagagctctcatccctcaccaaagaagtttctttttgccacagtctgagaaccattacatgaagccacaacgaggaaccaagaggaatcacacacacacacacacacacacacacacacacacacacacacacacactcacacacacaccatgaatttttgagggagtagggaggatgcaggcaaggctgaagtggagagaggggaggttagaaacggtgtactcatgtacaaattctcaaaaaatgtaataaaaagtggaaatggctaccttgttgttcttaagaaggaagaaagcatcttggatttagcattaaacatggcgttagttgtttttcatacacaatctgtgttagataagaactcctctgtacagcctaaatcatctcaaacacttttttccaggtatcttttatcttaataatatagttttttatattgattttcacattgttttgtttgttgagacagggtttccctatgtagcccacactggcaatgcatgatgcctcagcctttaggtatgagctaccaagctagctttccccaggattcctgaactctccatagtcaccctgtggttaatggttgagagctgaggctgaaactaagcctttctctgcttgtgttcatctcacctttctgtttcctgatgccttttagttgtcctgttacctctttcttgattcaaaatactcttctctcaccctcaccctggattatgtgttcttctttctaattctaaattttcttgttcttagagttgcataaagaaatctataagctttggtgatgtttaggcctattcaaagatggctaatgtggtccactcgtaggtgcctcacaaaagaaatgaaaacacacatgttcacataaaaacctgtatgcagccaacctcgtgatacttcttatcccagcatccaagacgcagaggcaggaggatcacaagttcaaatctatcctggtctacatagcagatttcagtccagccagaagtacatagtgagaatatgtttcaaaaagagaacaacaacaacaaagattatgtgcatagggcaagcctttaatgccagcactggaggtgcaaagcaggcgcatctctgtcagtccaaggccatcctggtctacatagtgagttccaggctagccagggctacacagtgggactctgtctcaaaaaagaaaacaaaattgtgcataaatgctcatagatgctcagactcctgtcaattactgctgacaagccacacatagtctagacatttgttagaatgtcattcgaatagactaggcataaactggaatatcatgaagaactgacacatgcttcagtgttcatgaatcatggaaaccaagtgaaagaagccaggtagaggcagtccagcacttgcccagtatggttttgattaccagcactgacaaaatgaatgtaaagtaagtcacaaaagacaatacaattctgattaaatgaaactccagaatgggaaaatcataatgacagaaaaaaaacattaatgcttgtctgaatctgaaggaggaggtagaagggagtaactgctaataaatatgtagtttcttctggtatggtgagaacattccagaattggatagtggtgatggttgcaagctctgtgaagagccaaaatggcatgaaataagcctaagtatttcttaaaggtttgcattgtagggtatgtgagttttatgccaataaatttaaatattgtccaaaaaaattaaaaaacagctaaaaatctatatcctcaaaatctgacaagaactccatgatgtgaaatgttggataaaatcaaccatgtgatcccttggcatcataaaaaccttgacctctattcatgttttctaaacaaccagtaaataaaatttcctttgcttcacatcctcaaaatcaaatcatctgtcccttttctttcattatttttaaggctagtaaatcactacagagaaggaagtcagtaataagcaaattatgtacattgtttattaattatgcattatgtaaatcatttgcaaaccctcttgtaagacttctctatagtctttcttttccctttgtttctacttagctaaaaaggtaccctccctgattttgatagtgaacaatgtgatgtgctcaagcggtacttaattaaatgaggatttaataggaccactgttgtgtggctttttaaattgcaggcacacacacacacacacacacacacacacacacacacacacagagagagccaaaacctatgataatgtgacatttaagttgaaaattaaaattcaaaaaattaggaaatgcaaaagttatagttgtcatagtgatcgttcttaagctagaaagttcagcatgcttgctgaggcttcatttttatacagccttttatatgacattgtttcaaatatatcactgctacatagctcataatggttactaacatatacacttaaatgaacatgaaatggttctttttcataatgcaatttgcaacatttcagaaactcaaatcagaactgaaataattgccctaagttcatataataattttgaattctgtctatagtgtattaactgtcttcctttcttcttttttctttttttatttagaaacaatcctattttacccatcagtcccccattccctctccctcccatcctcctatacccccatcaacacctcaacccaccccccactcactccccaaggatagtgaggccttccatgggggaattatcaagtctgtcacatcatttgggggagggcctaggccctcctccatgtatctgggctgagagagtatccctccacagggaatgggctcccaaagtccatttgtggactaggaataaatactggttccacttttagaagtcccatagactgcccaggcctcctaactgacacccacattcagagagtttggttcagtccaatgctgattccccagctttacagctggggtccctgtgctctcattaggtcaggtcagctgtttctgtaggtttctccagtactgtctcgactcctttgttcctccctcctccctctctacaactggaagtatggctcagtgcttagctgtgggtgtctgcttctgcttccatcagctactggatgaaggctctaggatgacatataagatagtcatcaatctcattataggggatgggcatcaaaggtggcctctccactactgcctggattcttagttggggtcatgtttgtggatctctgaacatttccctagttccagatttctctttaaacctatactggctccctctattaaggtatctcttttcttgctctcctctattccttccctgactcactctttctgatccctcttattctcttcttcccttttctttttcctacctccctcccctcttcccccatgctcccaattttcaaaggagttcttgttcctttccccttctttgggggaccatatatttctctcttagggtcctccttgtttcctagtttctctggtggtatgtattggaggctggtagtcctttgctctatgtctgctatctatgtatgagtgaatacataccttgcttgtctttctgtaactgggttacctcactcgggatggtttcttccagttccatccatttgcctgtgaatttcaagatttcattgtttttgtttttttccccactcagtaatactctgttgtgtaaatgtaccacattttctccatccattcttcagttaaagggcatttaggttgcttgcaggttctggctattataaaaaacgttgctatgaacataattgaacatatgtccttgtatgaatgtgagtcctttgggtatatgcccaagagtggaattactggatcttcaggtaaactgattcccattttcttatagaacatagttgttgtcttgttagggtttctttgtgctctgatgagacgatgaaacaccatgaccaaaaagaaagtttggggcaacagtatatttgacttacacttacatttcacaattcttcatagaaagtagtcaggacaagaactcaaatgggacagaaacttggaggtaggagctgatacagagactatggaggggtgctgcttactgatttgctccccatggcttgcccagcctgctttcttacagaacccagtaccagcaccccatgggatggcaccacccacaatgggctggactatcctccatcaatcactaattaagaaaatgccttacagctggatcttatgggggcattttctcaattgagtttctcaccttttagataactctagcttgtgtcaaactgacataaaactacccagcacagttgtcctggttggtttttgagaagaggaactccagtagagaaaatgcatccatgagattttctggagtcaagcttgtgggacattttcttaattaaactaaaccaatgttggagggcccagttcattgtaggaggtgccacctttggacttgtcctggatattaaaagaaagcaggctaggcaaacataaaaagcagcccagtaagcagtgttcctctgtggtctctgcttccgttcctgccctgacttccctcaatgatggatttgttaactagcaggataagatgaaacaaatcctctctttccccaagagaagtcttagtgtttatcacagcaatagaaatctaactagaatgatggtgttcagagcaattcattcaaatacctatgagatgaactcatttagcattacccaaatttacataaaaaccctcctccccagcaagttgcaaacagaatgtgagaaacccaaaatgttggattatgctcccagctgactttttgtcacagcctgtcagttaggtaaggtaagaaatttcccagcctgaaaattgtagaactctgtgtttcttccaagtttcatacttccacctttaaaagtaacccatcacttctccaatcattattccaccatctccctgatgaatacttttgaaatctcatttatttttgtaagacaagacaaaattgaagcatccctcgggcagcaaatagcagcgggcacatgatacatttttttctttcactaaaaagttgtttttcttagggcaaaacttgataggaaagctaagatttttatgagtaactagaaggcaaattattataacttacacctttatagcttcaaaacatcacggccaaaaaaagtatacaatcctaaatatatactttttgatatgttgtatcaaacaaatttaagtgaaataaattatttttcaattcccttggtactttaaagcaacatttcaattaactagctcttcttctaaggggagttagcagggttgagtgctttgactgggctcaagccaaatccttctagtctactgttgaccttgacttctgttcattattattctgtttatcacagtgtgttgttatcctgcatttacttaattctgtctcactgagaactcagggtttagaacttgcatttgccctctatttcacatataattgtatcctggtcacaggattgttatgtgttcccatatggatacataagaattgttatgtattaatacaattagttcttatgtatccacataagaaacacagtgtacttgtgggatgaatggttgatgaattatgacttgcctcacctccttttccccagtgtggatgctactgttgagtctacagtaagcattcaaggaaaggtctctctcctctctgttcactctgagttgaatagaaaccatctttacaatgcgcaagaaggaacgcttctatttcatttttggaaaccacaagtatcggcaatgtcagcagtaaatactgtgtaagtataatatatttgacactgaggcctgagatgctagggacttcaaccaaaatgtttacgggaggactagataaattgcttgtgcagtgctttgtaactttcagctcatactttgatctcaaacctttggctccatcaaagccattttgtttttttctggcctacacgtatttcttttaaaaaactgtgtgaagtttattatctaaaaaacttgcaaataaataatgacccattccatggactgaaagagcataagaggttcaaaatatcattgttcaaaaatccttgatccaaaagccaccattcatacaatgaggagtcttcacatattcgaatattatgagacaagaacattcaaagagggctggggatatagctgagtttgtagagtgcccacctagcatgtaaaaagccccaggttcagacaccagggatgactaaactaggcatggtcacatgtgcctgtaatgctaggacttgggaaggtggaatagaaattcaagaacatcctcaaatacatagtgagttcaagggcagcttgggattcatgctaccctgctttttaaaaaggaaggggatgggttgttgaagagatggttccgtggcaaaaagagcacttgttactcttccaaaggacctaggtttgagtcttatcacctacatggcagctcacaaccatttttgggggggggtattttagagacagggtttctctgtgtagctttggagtctatcctggtactccctctggagaccaggtaggccttgaattcacagagatccacctggctttgcctcctgagtgctgggattaaaggcgtgcaccaccaaagcccggccagctcacaaccatttgtaactccagtgccaaagcatccattgtcctcttctggcctccacatgtattgcatgcatgtagtacacagacatacatgaaagcaaaacacactcagagaatataaataaataaatattttaaaagaatattttaagatatgaaaataacaatttctactactttggtaaggattgaagagttgagattaaaattaagttcagtggagtttatttttcttcttcccaaaggtatctaaacagaatcactctaggcttgtatgtgtatacacacacacatacacacacagagagagacacaattagtgatcatcagatacttacattctttcatgatttcaatttttcataagcttcaataatcatatttatgaaacatcattacaaaatgtgtcccatgctgccattggcttggttaatatccttatcctcctttcttttacataaataagtttattttcttgtttgggggtggtagcatggccaactaaatcagcgaaatcctatgactctcatatggtcacaagatgtggctttgtgacacagaaactcatttatatgacaatttgcattccaaggccttcccaaataacactggaaactagggcaagcatcccatagagaagcctttacacaatacttccatgttttggtattccttttgcctgaatgagtatttgtacattcagaaaccgccatgagaccatgagaccaaaagtcacataattgttctaccaactgtggatggggccacaaagctatgcaaaaattctggaacataaatgaactcttgaacccattgcaccatttatgaatgccatctttttattgtcccagaaaattacttggatattatttgaagaagccactgaactcatttgtgctatgtgctgcttaattcaaatccacagtaaaagcaaaaaatagatttcatgccttgaattagatgagattcgatctgtctttacttgggtgctgtgtctcccaaaggccatgtgttaaaggcttgatcacaggcctgtggtgtactgggaagatggtagaattttaagaagtagaagaaaattaagtcactgaatatgtgcccctaagggaacatcaggctccagtcccttagtttccaggctgagtcaggtgagcagctatgtttcattgtgcactcctctcagtaatgtttggcctcaccacgtgacctgagtgacaaagcctctggatctatgagtcaaaatctgcttgtcctacctccaggtggctgtcttgagtgctttgccacaatcatggaaagttgttgggtacagtcccttagccaaggatattaagggacttatacagcagccagacagtggctccttgaactctgcttccagcatcttcacctgatgtgtgtggtctctctctgctcccctctatcactctcttagctcatggcttaaattcatctttcaaacccttctaaagtcatccttatttcctgcttataacgcagagtaagacaaaaggctggtgtccaaaattgattgtagtcttcgaagtcttaaggtacaggacatgattctaaaaggaaatttcttataatatttctaagaaagaaatgaaactgttttaaacagcatcctaaactcatagggtgaatctgtttcttaccccaagattgggaggaacaggctgaaagtgagtgaaaccatctatcttttgcaaggtctaaaccactgttgttaagatgatgcttttctaagatgatacccaggagctgaggcatagctgtcaatcttcagacatccagcattcagactttttgcctccagcagaatttaaagtctagatacatatgttctacctcttgatatgaattgttttaattgcttgttaaagttgaaattgtcccactctgaaaagcaacaagaatataaatttcagtgaacattcttccttcgaggagagcccccgccaattacagcactcttaggaatttaacttcagatacagcatgggagacaattaagtctagggaaaatgggactggaaatacacaggccaccattgacctgagaggcctcctggaagagtggtcatttgtcagcatttatgacagcctttacaatgtgtgactttgctattggaatggaaatttctgagcattaggattctgttacagatgattttttggtttttgttgtttgtttgtttttttcaagaataccttaaagcaatgctcccacatgatgtactgattaaatttaagaaatgctatattttgaaaaagaagaaaacttcatcactatataaaggctttagggtctcttccgaacaaaaagaggtttgatattatttaatatacttgaatacaactaggagagcattaaccaacagaaaacttgtgaacatctttatcccacagtgtgattgcttttctttcttttttttttttttgcatttaaaatatttttactttgagagatttaaaaatatttattttaattagaaagaagcttattttacatgttaatccatggtcctttctccctccccccctcctctcccccccccaactaataccctacctatcccatacccagggagggtgaggcctcctgtaggttttctttgtttttataatctttccctaactccaaaataaaaggctagccaaggaggaatgttgaatgagttataattaactcttgattttgttgactttttttttttttaacctattccccaacttcaaatttgtctgctaactaaaacttacttgtagactcaaaatcaaaactcaaagtgtcactgtagttactcacagacatacacggaaaggtgatgttttatgatccagaggacacaacctcaactaaatttacatcagaggacaccctgctttcttgttgactctccccaactgtaaataaccatttttctcagtatattgggtactacaattttgcattttcttgttggtcatttaactgtggaaaatgtccctgaactataatgccaaacatacatctattgttcccatgggcaagaaaattgtctatgtcttatagagaaaatgcatttggaaatatgtctctgtgtgtatgtctgtctatacttgctgatagcactataacacaccctgaagggactgtgaattgcacatgcatgtgcttagtatgtcaacaatgtgtaataggtaaagtgcttttaaacagaacatatcaaacaagactgtatgttgactggttgacaaaaatgctgtgactggaagctcacagaaaccaaacccatatttcccctaagaatggcactttaaaattccctgactccatggtcatgacagtattatggataataactaccacaagtaatgggaattgcctgtactttactgagactgaactcagtttgtcaagcacatagtatatcaatcctgaaacaaggtatttcgtaagagtgagaaagttttgttcataaggtgattgaagctgaagagggcaggcctaaggattaaatatccagctctgtaagatcagtattaaaggactgtataggacagagcaacagggtggcctgaggtggggagataggtgatgctggtagtgagaggtgacgtcattggtagtttaacgacctctgcaaatgtattggaccttaactctcttcagagcaaccattttgaaaatggctgatttagcatggtctgtaggcagtggtataagccctctaacaccaaaagatcacctccttgcaggcccacatgaagggtcactggtttcaaattgttcaagatagacaaaagcagtctctatgatcctgaaatttaaaaattattatcatagtgaccatacactgcagatgttgctcatggcaaagctaacaggtatgtaccattgaggtaggtgactctaaaatcgatgataaagctagcaaaagaggccacaagatggctcagcaggtaatgatgtttcccaacaaacctggcaacctgagttcgatccccagaacatatggaaaggtagaaggagagaatcatcagctcctcaaaatcatttgtccttcatacatgcacatacattcacagatataggtacacacaaatgaaaataattaataataataacataaataaactagggcctgcaattgtaggtaaatgtgctcccttggcatatataaggcaatccctagcactgaaaaacaaatacgtaaatgcaaggatatttgaacgtttattataacttttcactaggtttcagtagtatgttgatagtcaatttattaaatttcttcaacacacagaacaagaaactattaagattttcctaggtgttccttggcacattcttcagagcttggtcttaaaaacctgactgggacaatgtgagaatgaagaaacagcaggtgaacatacagaaaagctgggatcaggtgagctgtgctcactccggtggagagagcgcactgtgtgacatggtatctcatcacatttattacgtccaccacaaggaggcatgtttagctactttgggtgggaggtctctatgggagagaaatatcaggctgaaaacatggagaggcagggagaagctgccattgaagctttctgttatactgtcaacttttgcactctacaagggaaaggctttgccacttctctgagcttcacttggggaaggtttcccatggctctatgacatggatgtccatgacatagctatgtccatgtcaacagcacacactcactgagggctttatcctctttccacatttcttatgcctgacattttaaagtttaagaatatggtgttttgctgggtatggtggtactgtaatccccagtagtagaaaaatcttaagtagaaagactgctttgagtccaaggctaacttggtctatgtggggccttggataccagcctgaactacagaacaaggcaataggacttttccttaaaaggatgatgaggaattaggaggagtcaaaggaaaggggggaggaggaagaagaagaaaagaaggaagagaagaaaggaataaaactataaagaaaaaaggaagagatgaaaccaaagctacaataacaacacccactatgtgccaaccatgctatgcatcttatgacccactatgtgccagctgtgctattcatcttatatgaacttatgaaacaggaaaacttgattgcattttacctgtggaaagcacttcacagaaaagtgaagtgacccgatcatattctcacacgatattcctgtattagttcattgcctgttgctgtgataaaactccatgaccaaggcaactcacagaatagattgtttggggcttatggttccagagggttggagaccataatggcaagtagagggagcagacagcaggtggctgaagcagcagctgaaagcacatgtcttgacttttgaacaggaaggagagagagataactcaaaaaggcataagtcttttgaaacctcagaggcaacccccctgtgacacacatcctccagcaagaccacacctcctaatcctccccaactgggacccgaacattcaactgtccaagactcatgagagacatctcattcaaaccactacacttcttttaacacaagctgagtcatgtgtgataaacacctgttagatcatgttttatagacagtagcccacactagtaagttgtttattatccactttctgacctacaggtggcaactaggaatgcaatggccttcctgcagactttccagatcaccttctccatatccccctccattacaccattggctagttaattatttaaggcagtggttctcaagcttcctaatgttgtgaccctttaatagaattcctcatgttgtggtgactcccaaccataaaattattttcactgctacttcataactgtaattttgctactgttaggaatcacaatttaggagtctggcatggtgatgctcacctttaatcacagtactacggaggcagaggcagaactctctgtgagttcgaggccagcctggtctacagagcaggttccatgatagccagagttgttacacagagaagtcctgtcttgaaaatccaaaaataaataaataaaatcataatttaaatatttgtggagatagaggtttgccaaaggggttttctttttttttccagtcagcttctttattaaaccaatcacagtgacatatattcacacagtgtaaaagaatataccatattacataatttaaaatctagtataataacagtgtaatagaaaaacattggattggttaatatgtggtctcagccctgttctgatttaggcatgaaaattcagggagctaaagtggtttccattgtgggtcaaatttgacatgtgttacattttatggcttaagatattattggatttcatgaaatattaataatatactttaaattaaacttctgtagttttccttttaggtattttctccactcaaataatttttttttggttttttttttttattagttctagttagagaacaagcttatttcaagtcccttctccctctccctcccctcacccccaagcttcctcccccacccccagcctacccaccaccccatccacccaccactccccaggcagggtagggccctcaacgggggctctgcaaagtccaccaagtcttcctatgctggtcctgggcccttccccatgtgtccagggccagagtgtaacccttcatatgggatgggctctcaaagtcccttcttgcaccagggaaaaatactaatccaccaccagaggctccctggagtgcagaggcctccttattgacatccatgttcaggggtctggatcagtcttgtactggcctcccggacagcatctggggtcgatgtgctctcccttgttcaggtcacctgttcctgtgggtttctccaacctggtacagacccctttgttcttcattcctccctctcttcaactaaattcccgatttcggctcattgtatatctgtggatgtctgtctctgtttccatcagccactgggtgagggctctaggatggcataaagagaagtcatcaatctcattttggggggagggtttttaggttatcctctccaccgttgcctggattgtcagatcgtgtcatccttgtaggtctctggagatatccctggttcctgatcccttctcgggcctacagtggctccctctgatatcgtatctctcatgttttcgacccacaggttgagacggtcattaacaattcaaatgtcttgaattctccaaagttctcaagacttccaggatggaatccaagctttggaaataatttaaacatactgagcttaacttgaaaacccttgtcacctactataccaatcccctccaaagaaattatcttggacttctgggatctatatgtcagcatcacactgtgattcatttccatcttgctgtctacatttcgattgttgatccttccagacaccagggtgacactttatacattaagtacctaatacatgatttttttctttcaaaaacttgttagtatatttctttatttgtgtgtgtgtgtgtgtgtgtgagagagagagagagagagagagagagagagagagagagagagagagagagaacaacttgtacaagtcagtttactttccacaagtaggacccttgccttgaactcatgtcatcaggcttggcagcaagtgcctttacctgttgagccatctcactcacccctgactatttcttaatataattcactataggaagaggcaaataacaagagcacataggaaaataataaatacatatttatatacatatatatatgtatgtatgtatgtatgtatgtatatagtttcacaaaatacatgacttgtgagagaaaagggcatgtgtactggattttaagcaaattacttaaataaaaagggaattagaattgttggatagtaaaaaataaaaaacaaaacaaaagatcacacacctttaattccagaacttgggaggcagagacaggcagatctctgtgagttcaaggccaccctggtctacaaagctccacagagaaatcctgtctcaaaacaccaaaaaacaaaaacaaaaaagaattgttggttagtatgcaatacgtgatggtaaaacttgccatcctgactggatcttttttgtatgtatttttttttttgagacatactcttgccatgctgtctcaattatggctggagcttgaaatcaagctgtcctcggtactcagacacactggacctataatcgtgtaccatagtaccaggctaatgtgtttaacattttatgtgtatccaacagtctagggtttaagattgaaaagaacctaagagagcctttgtagcctgggggataatatcaagctgtttaatatatacctatattttgagttccagaagagaagacagaaaaggttatttgaggaaataatggctggtaatttctgaaactggatgagaaataagtctaaaaatccaagaatcccaaagccctaggcaggaaaagcaatagaaaaacagactaaagactactcaaatgccaccaattaaaatcaatagtggaacttctatgtcccacttttagttgctggtctttagtttctttttaaatctatagaactggcaaattagtcatctagtgtggtattttaaagtattaaagatgacatatagaaattgaaaagaaattcttaagaagacccataataactcttaaaaatgagttaagattccaattggcttgttccagagctcagctctactattgaaggattttcatcaagttacatgagttctctgtgcctcagtttcttggaaactgcgattatcttattgttactgattgtgacagttcagtgaatgctgattacaagatataatactgttctttaaaatagaactcaggaaatgggtagtattttcattcaataagaagttagcaaattagaggtttctctacatgacagagatgtcctagttagggttactattgctgtgatgaaacaccatgaccaagacaactgaaagggtttatttcagtttacatttgcaggtgataatgcatcagttaaaaaaatccagccaagaactcaaacaggccaaaaacctggatgcaggagctgatgcagagaccacagaggaatgatgctttctgccttgctccccatggcttgctcatcttctttcttactgaactctgtatgaccagcccaaggaaggcaccacccataataggctgccccctcatcaatcactaattaaggaggcattttctcaatttatgtagcctcatttcagataactccagcttgtgtcaagttgacataaaactagccagtacaagagccaatgcacacatgaactcacagcaacagtgctgcctacttaagccctgaacaagatcaagtcagtcagcattccagcatggataggggatggttcctgatgctccaacacaacatgaaaaccattgacagctgatcattgatcactgctcagggaaggagagtcaattttcttcagatgtatggctttttgaagactgtccatgttccaacagatggtcctatgcccatgtgtatatgggcatctttaatattggactaagtgggtaagaaaggaaggcgggaaagagggaaggagggagagagggagggagggagggagggaggagagaaaggaagaatgtgtaacggacagacgttttctgtcccaaccaccaggtcccaaataaccaactcagaaactgaataattcttaaacatgctcatctgatagcttaggcttattaccaactagctctcatattttaagttagcccatattccttattaatactctgtcatgtggtggtacctttattggcatggcacattcatctcctgttccctctgcatctggctggtgactccacccatctttctcccagcattctaaatttggctttcctgcctaactttatgctgttcagatattggccagtcagcttgtttattaagcctatcatatcaacgtatattcatacactatacagaaggattattccacagcatttctcccctttgtcaaactaaaaagaaaaaatttgactttaacatagtaagattatatataacaaaacaataagaattacagttacaatatccagtctatttgtatttgacaaaattagagcaagcattctactatctatcttatgttggtggatctgaagttttatacctaatttgctttctatcataactaatgaaaactgtaagtttaactatttagtctttaactccatcaaaaaccccagaaggacgaaatgttacccaatgacagtgacatcaggcttcttggacagtcagccaaagttcttctgtaatgttgggacaatcaactctggcctacaggcctagcatattggacaggctttcctgtgcagcagggaattatgaaggactgttctaccttgtcttggcaaagtttggcagtcacctttcttgtgtcttgcttggtccagtttggacagtaactgtcaataattgaggcaagggcagtttctttgcccacatggttagattttcccataagaaggcaaactgtataccaagtttttaaaatatctattatcttctctgaagtagattggtgctgccaggagcagatttgtctcactatcatgaaaagccttaggttattaaaaatattaaatgtcatattctgcaggtctttgaagtgtttgaagacaatctatccacatatagctgtgtatgaccttaaaagcataactaacatgactataagttggactattgtagatgactattaatctgtattttaattatacattgcatttttaatgagttgcatagacataataccttaaacaagagtagaaatatacatgcagtatttaaaaattaactttaaatttgtatcaatagccaaaatccataccaacataaaatatttaagattaataattttttattaaagtagattcaatagcataacctattctcctgtcacttctatatcccctctttttctttttagaatgagatccctgaatttaatattctttgttcaggtcttttcctgatcattaccaataacaacttgaaaacaacccacctaaatgatgacaaacattcataatttattttggtgattgtgggtgtagttttctaggctacttcctgttgattggggcactgataatctttggggggaccctgagaaaatttaagataattgttaagtcttggctgtagtattctgtgaggctggatcatcctagccaacagccattctggatgctgaatcacctgggccatcattttcactggtgtctggtccctttgctccataacacataaatgtttaaagttaacatacatatctgtgttagtacaagtatagattgcacattgtacacaaatcagccaaagatgatttttttgttatgtgtttgaacaagtaaaatatatataatgtatcttgttgttcttctaggtttatttttatgtgtctgtaatcaggattgcaagggatcttctttgatcaaacctgattttcttcaacctagaatgaacccacagcctcttgttttctgtggaaataaaagcaaaacctctcgcccaaattaacacatgttttgtcctaaagtttgaagtcaagacattattaaaatatataggttggattaatccaacaacatttataataaaatgtcttttagtagctgttgctccttcctcatagtcaagcaattcaaagacaacacaataacatatagtagccagactctctgtggattttccatctttgtgtggcttattataatttttattgtgatattcatttttaaggactttttctaccctttttcttttctctcccaagcctacacatattcttaaacacactgtaacatgtttagagtttgtttttttcttagttacaaatgctcatgaattgggggaggacgtgggaggagggtctgagagaaaatggaggaggaagaaaaggagtgtatggtcaaagtacattgtatacatgtacaaaattctcaaagaatgaataaagtcaattaaaaataaattaacagtaccattctagcattgctgtaatgtctctgttccattgttgtgcctgctacagtctaatctatcaataaatccaggatcctctggtaaaggttggctttgttgtggagaaggaagaagcaagcttttctcggggagtgaactctcacaagtaggccaaatgcagtttctccctgggtttcctgaagaaaaatctgctgttataatcagctaactttttaatggaactatgtttgctggctaagtttatgtcaacttgacacaggttacaatcacctgagaggagggaactttcattgagaaaatgcctctgtaagattggaccataggtaagtctgtagagtattttcttaatttgtgattgatatggagggcccaggtcataccggttccatgccctataaaaaggaggctgagcatgctagtaatcagcatctctccatggcttctgcatctgctcctgtctccaggtttccgtgctgagttcctatcctgacttcccttagtgacgcattatggatgtggcagcatgagccaaataaaccctttcttcttcaacatggttttagtcatgggtattttatcatagcaataataacccattctaagacaaaattggtaccaggacaatggggtattgctacgacagacatgactgtgttttgaggaggattgtggaagaactttggaacactcaataggaaagctactgagtgttgagagctcagtaggttgttctgtagaagttagaagagtgttgaaagcaatttagatgatggagatttggcttgtgaagtttcagagggaagaaaagactctaccaggacatttgaatgaagaatctgtagtggttggataactgaagcagaagaattggctgtgatgaacaagagaccagaaccaccactaacgtttactgggacaatagatgctggtcagtgggtactgaagaatcaatcagctgtgactaagtgtcatggaggtgaaatcttctgggatgtttcctcaaagtcagcactgtgttcagaggttaccaaggctgtgccttgttctggcagccaaacttggtcttgtgtaagattctcccagatggtactggttttgaaggcataaagagtcatggagagcggctcaggctttggcactgtgtaagaggtcattggtgaaattggcatctgaatagcagtggaaccctcaggattgaagggccatgaagagagttcaagagagattatcagtgaaattataggccagttgcagtagaagactgatgctttggagatgtcagtactatcaatgaccaccaagaatagcagcagcagtggagtgcagctggtctgaacataaaagacaaagtgtgtgtgcctcagatggcagagccagacaagtgacccatgcctcttgaaggagcctggaagatggtgagtgaattccagatattgaacattgaattatttactctgttggagtgtgggttttgctctgttcagattacaacagtgctctggttcttacctcttgaagtaagaaagtatttaacttatttttttattttatctcagcccattagttgagaaactttgaatttttaagagaatttgcatttttacagagattgaacttgtgtttaaattggtaaagactgtgggattgttaagtttgtagtatgatttatgtttgcaatatttatttgtctaaggtcttcaaataaacaaaataatgtcttaaaaagtgttgtgtgtcaagttgagaaggggttcaattgtgctgtgtaattttttgtcatcttgacacaggctagagtcatctgagaggaaggaaccccaactgagaaaatgactccataagcctgggctgtaggcaagcttctagagaagtttcttaatgagtagtaattgatatggaaggtcccagccacccctgggctggtggtcctgggttctataagaaagcaggctgaacaagccagtaaggaacacctctccagggcctatgtattatctcctgcctccaggtttccaccctgtttaagttcctatcccaaaatagaaactgtgtcttagtaaaaataaaaatctttcctcaaaacagacactttagaagtgtgcaataatattactccccttctccttatagaaatcaattttgtacctatctgttctcacaagcttcagaattataggactggtttgaggtcttagatcacatgcttccactgagacaaaatgctctcttgatttttttttcattttaagaatgatattcttctttacacgagggaaattacctaccaattcacacatagagacatctgcccatcattctgtcaccaaaaccccaaaagtcatcttgcattgtcttatttggcactaaaatgagaccctataatcttaaaagaccagagtctaattcagtatgaccctgctccagatatcacttttaattcacaccatttcatgtcatcatggagcaagggtttggatcaatgtcctgcctcccactgactctgccaacagcactgagagtctcacctcagaggaaagagtagatgtaagtgcatttgctgacaacacctgaataaaagaagatggctggttttgctggtgaaataaaaagtttgacttcaaaaagtcagtttgaaactgactcttcctgaatgcaatacaactggcatttggaattggtccaccttccctaaagtataggcaaattgtcttagtcaagctttcttttttgtgtgtggggggtgggggtgggtaaaccagaatcgagagcagatcaagcttgtttgtgggggaaattggttaactggaaagttaccggattctctcacagaccctcggagtgaccaaacctatcaagcaattgcatgccgcactggcaagtcagcagaagtgtaggctgctttctctgtctctcatctctgttttagtgtgtctttgttctatctttactgactagtttccaccatcgctttgctcatgggagatctgcaatgtggttttcttcgttacattctctgggacttccacaggcagaactgaacaagctacctctgaattccagatcccagccacaaggagtgaagcatcttggctgaagtcggggcagaaatcctctgataacctgatgggcacagtcaacatgtatatcaacagttcataggaagtatttttgggacatcagcatggatatttaaggcccacttctgcagggattaatagggaaattctcagagcaatacattcaggaggtatccctgcaaatattaaaataattgactttatgtaataatagccattaaaggtgattcctgactacagaattcaaagaattcaactttttacctcccctgagtcactgaagtgaggaaaagatcccacagtcaaccctggcagcctgacaggcattcgtgggtcagcaggaaacgtgagaactgccaggtctgtggtctttagaaaaacacagctccagtctctgagtctcctgactctccttttcaatggccagacaacagtgttttgaggaaattcttcctgaagttagtgggaacctgagtccaaacctaaatattagtcaagataaaattttatctagaactttgtaacatttgtttttttaaagcattaaaatttatagctaagctgcagtagattctaagcgtactacagcatgtgctaattttttgagataatgccttgggaatatgcagaagatcttataaagcctgaaggcatttccatcttgatgtactgactggatggtgaattaaaacttttgccctgttgttcgaaatgttggtgaatatttcttgtctttttaactatctgtctcttccccagatttttatgcttaatttattctcttttcttgtaacttcccacctgtgatgaacttctagtcacttttcaaattcatttatttaaaaaggagtgaaggactaggaagacagctgatccaataagacacttaccttgtaaatgtgaggacctgactccagagccctggaacccaaatgagaaatcaggcatggctgtgtgcacttgcaatcccagcaatagcactttgggaagtagaggcaggcagaccctgaaagctccatggccagctagtgtagcctactcggtcaagttccagactatgagagactttatcttgaaccagctatgaaaggtgcctgtaaaaaggcccttgacattgtcttctggcctccacacacgcaaacacatacacacacacacacacacacacacacacacacacacacacacacacacactcacctgcactcactaatacataaacatgcacacttaaccacaggcacacatatacacacgcacacacgcaaaagtaaacacacattttatagacataaatggagatttgtgggaatacaattgcatgatgtctgagatttacccttaaatataaatacttcagcaaagaaaaaatgggatttataaagctggcattttaagttctaataggcatttggaagggtatgacattattctgtttactacttttgtgggtattgaaacatttaataaaataatatagtttaatactgggaatatataaaagatatgttcatccactcagcaattgcttaatagaagaatcattccctgaggtccaactgcactgtatcagtggaaccaagacccaaatgttttaaggcaaacacacacacaaacatacacacacatacacacacacacacacacaccgtcttagttatggtttctgttgctgtgatgagacacgaggaccaaaagcaagttagggaggaaaggattgcactttggcttacatttccacattacatttccattgctgaaggaagtcaggacaggaactcaaactggacaggatcctggaggcaagagctaatgcaaaggccatggatgggtgctgttcactggcttgctcctcatggcttattcagtctactttcttataaccagcagctcagggatggcaccacccacaatggactggacccttccccatcaatcactaattaagaaaataccctacagctggatcttatggaggcattttctctattgaggattcctcctttcagatgattctagcttgtgtcaagttgacctgaaaccaccagccaacacacacacacacacacacacacacacacacacacacacacacacacacacacacacacaacacacacacacacacacacacacacacacacacacacacacacaagtctctgttctttgctgtgggccttccttttccttggaacactgccaacttcccaacacatggttatagcacactgtcacacacatcaaaacagggctagataagagagaacaaaaagagcatctatctgaaacaacgttaggaagtaaaagaaagaaatctattttaaaatctcatgatgtttacatctataatttcaaaatgggttctttggcttcttgtgagttcaagtttgaaatttaaaaataaatgtacacaaaaagttttaaatacagaaaaagaatcattccctaagtcccctctcctgtgtcattaagaatatttacttttgaaaattgtcgggtatgggaattccttacttctttggcagtccattagatcatggtataactgtaaggtaagtatttcacaatgtattaccattcaaacctctactggaagcaattggcataacaagtattactaatgttcttagaggtcataacaaaatgaccacttttgctaaagtgttcctttagaaaatgtattttatcttccacttagatgtgaaaggtgtggcatctgcgatttgtgatttaaaattttagagaaagtagtcttagatgaaaatattttttaaaaacttgataattgataattgtagaaatgtagtataaatgacctggggtttactgtagtgttttcacagagttgtctatactttagaccaggtatgattactcatgcctatagtctcaacatttgggaagctgaaacaagcatataacctccttttaatgccatcctgatcccaaatttctcagatgagtttcattttaaaagatatatatatatatatatatatatatatatgtacacacacacacacatgtatatatatatgtgtgtgtgtgtgtgtgtacatatatatagtgaacagtacatgagctgagagtatttttgtatatccttatttgggtttatttgaatatttgaaataagcattgttgttttcctttagtcaggttcacactcccagcatccacacacttgcttatggagacttattttcccatcattcttgaagatgcattgagaggctggcctctttgcataagtagtgtctgtcatctcccaaatcccttcctatggcagataacaaatgtgctccaacgtttcagttatattctatatggagtcccagagagatattctcaatcaggaagtaatggagtgatgtcagtgaacagtgaaataagtacctcctcccataaaggtaacacatgactagtaaaatgccctgtatccacttttcagagctgtgctcatgaccaatggattgcaatggagagtctgagctcaaacttcttgtgatttgcacataattgcataagttcatatgtaatgtgtacaggtaccaacaaaggctagaaagggacatcagctcctgagacccggagttacaagcagttataaacttcttgacactagtgctgggaactaaacacaggtcctctgtaagagtggtaaatgttctttactgctgtgtcatctttccacccctagacctttgttttgatgaaagtagctaggctatgctttcagttgggaagttgagacccctaatagttagggttatcattgagagtttttttttttttttcctggtgagttccatctactgtttgttcttcctgtctcccttgttcaccttaggcgtttgctgatttatatcaatgcataggttgattcttaaccagtcattatttactgatttatcactatccatgaggtttgctatgctcttatattgctgtgctatgctcttcactatgttctcatgttgtgtctgcctttctttctcctctgtatgtagaattcctctgagtatattctataatgttagcctgatgctcatgaagttttagtttgtgcttatgtgggaagaactttgtttctctatctcataaaagacatcctcagtgtatatcataaccttactaggtagtttatgtgctaatggaatatgatgcatttcattctctgctttttaactttcaggatgtctacaaaaaggtccaaggttctgccgatgaccttgaaggcaagttggcttttttctcctcttgctttagtaagtggtattgtgattttgacagttaagaggtctggaaaggttttcttgggtatgttgaaaatgtctcccatgcttacatgtccatatctttccctaaacttggaaaatttagatctataatctcattgaacagtttctaaggccttagtttatggctccactacttctagaacatgcattttgagggttttgtcttttctctatcccagagttcttggaagctttgattggcttgaccattattttcctaattgctgtttagatgtagcaggattcagccttctcttccatccttgatgtgtatcctggttaattttgcctactggtgattcttcccactgactttaattttctggcttttcaatttccagcatttttgtctcaatttccttgctgaatcgttcctccacattgttgaatttatcattcatcttggctaattttctcatctatggtgctgattttatcagcagaattgactgtcttccttcatttatctgcttgtttgaaccacctttaaagtccctgacatttttaacactgggaggttgaattcttttcctggcatttcaatcatttcatagcctttggtttcagtcattgagaagctgtgggtgggttgtggggttatatagttttgccttttcataattttgtgtttctatattgtaatttgtacgtccactgagatagaagtatctttaagtttcccccctcccactgtatctttttatatgggccttgttagtggatggtcttccttgggcttaggaccctcagtaatatttagaagggacaagcaaacagcaacaaataagaagaataatttgtgaggaaacccagtactaaaatgaaataaatacaattgaaatactttgaccatatctctaattgatctgggaaacaaaggaactgggatattgttaaaagcttaaaaattattaaagctatagaaaagtatagttaagaagtaaaaaaaaggtggaaagaatggggaaatagaaaataagaatgataaggtaaatatatggtttggaggtcaaataaatagcagagagaatacaataaactatgtaaactatgtgcaaggaaagaacacccatgaaacctaattaacagttgaaatgaaacaagcaattatacaaaaatgaagatttacaaagaataaaagatgaaatgaagtaaaatgaaaatttaaatgtacagcatcagtcagtatctttttctttctgggttgggtgtttgtcccttgtcaccccacacacagtccaagatgtcttctagatcaaactctgatagtaagcaataccactgatgtttacagttcaaacatgtttgtccagaatgtctggcatgcattcattaccttggtggagctcaaacaagttaccagctgggttgaatttttgttcaggtaccagcaggggccagccattctttaagagttacccagatcatggcatggtatgccattcaagataatttccacctggatattgtcttctccatatttcaggtggctgtattgtccccacatggatttcagtgtcctaggctttgaggtggccacattcctgcctggacctactttgtgtatggatgatctcatctggtcaggctcagactacttttcactagcatcccatggtcctgagaatgtttccaaccatcaagtttccatttgagtcagctcccatgttcccagggacgtgtggttctccagtccttgtgacactccagatgcaattggtggaggaaaacttgggccatttgaaggcatgctagtgctgagttttcttctcttcccagcagaggggagcttgatttaagagttcccctctggatctgacacctccttttcccagtgtaataagaagtgatggcatcactttctggtttctcaccatctgcattacaaagcctgtttctcatagatgcacatggtgcttcttgctatgtccttacatgaaggagcaagtagctgttatgctttgaacgtgaaatgttttccattagcttgcgtgtttgatcactgggtccccagctagtggtgtgttttgggaggttgaaggacctggaagaattgaaaccttactgagaagtgggtcgtgtaagtagacattgaggcatcagagcctggccccatttcctgtctgttctcttcttccagactccagatgcaatgtgaccagccacctcatactccagctgccacaccttcctgtcacaatggactgtgtcccctcaaactacaagacacaatgaaccctttcccttgggttgttacttgttagggtgttgtcacaaaaatgagagaactaaagaatgtagtagctctctgttttgtaagaatattatttctgtacataatacctccagcccactgacctcatcaccacctaatgttagctcactgatgatagataaggttacatgtaaatttgagggacacaaacatccatactacagcacttacaaaatcacattcttcatttcaataaattaattgcaaaagattaaaaatagcccactacaagcacaggaatgataaactttcttccgcagtaagaaaacacagtaattcttcccagtcctgatggtgcagcctaatcatgacagacagttggaagtctgagataccagcattgcaatctcaggaactgcctgagctaccgaatgagttcaagaccagctggggcaacttgttgggaacctgtctcaaaacaaaaagtaaaaagagggctagggatacagcacagtggtagagcacaggctagcatgtgtgagacccttggtcccttctgcagtacagcaatgaattgctgctgttgttactatcctaacataaatttataatatagtagatgaaattttattacatttagaaagaaggatggcattccccacccccccacacacacacagtaaatgcttaaaacccatttttctgtgaggtggctcatctttctgaatctaaagcaactttgcagttcaggttgcatgctttaatatctgaatgtttccagcctgcaagtatgaatacattctgcaagataaaaatccatataagctagagaataaaagtctacttggaaagactgtttatacaatgattaagaaatgttccccatcttgcaaggcttgggagaaccactgccaacctaacttctaaagggatatgtgtggctcagggtgccctgcatgatgatgcaggcagacatccttcatattactggagaattctcattcccatatactgcaagccagggaaataaacacagctttgatcgatggttctaggaaaagaatgtgcaatgtggtgtaagcacgttcattgtttgttttgccttttcctgagagaaatggctccgagaacggcaccacaggctgaagacaataccaagatctgattctgtttccctctgggaaccacagagctcattagaatggggggtgtccttgcacctcctacctatgctcatgaagagctaaggtttttgttttattttgttttttcagtctctccaataaccacttttaccactaaaaatttaacagataagcctacttcagtgaattgccctgtagctcactgagatcaaaattgaaaacaacattacacattgaatttcattgggccaaagcagaatgactgatttcaaacccatctaaagatgttcttcctctagtcttctgcgtcctgacaactgactccacataccatcaaattgcttaagctaaaacccctaatctttcttctttcccacccccaacatctatcctctcgtgtccaacttcaaaacatctttcaaatttatccacttctctcccacacactgctactgtcctaagtcctaactaatagctgtgagtctctcttatttcattgtagtgctctctgctgagaaattagattgatctccaaggaccatgtcatgctccctacatcaacccctcttcccaaagtgttgcatcttacatagaatgctaaccacttatgaagccctggtctatcaggccctcacttctctgcctgcctaccttctatcatacccagtagacaaaagcacagtttctatccctctcatatgccaatatcactgcactgctgcactaggactttgtgtgtctgacaagctcttgagtaatttcaaggatatagatagatagatgatagatagataaatagatagatagatagatagattctatacatattctacacacacacacacacacacacacacacacacacatatatatatatatatatatatatatatatatatattctaatgttatctttagtgatgtctgctcttcttgtgtctctcctataatttcagttttaatcatagtatttacctttacttcaattatcgtatttgtacttttactatttatgagatataatctacatggaaagaagctagttttatcacttgctttttcttctcggtcccttgagagcaacagacatgtagtagacactcataggtattgtgctcaatagttgagttcttttcaggtcaaagagcatatctgctttcccacaaatatttattctccagtgccttggtaggttctaggcatgattctagaatcaagaggcttgaatgctaacatttcccctttgcatctatactttgtactaggtgctggccaagcgatatctttggtggattattattgccactgaattatcattccacctaggtaagagtacctcagaggaagtttaatgtcttaactgtttttactttaccgggaagacacaaataatactaaaagcttacattttcaatcaacagaagttaatgaatcactaataatataatatgcttgacatattataactttaaaaaatagattcagcataggacatacctaaaattacagccacaaagtaagcccaatgtgccaacaaagtggctgatgactgagaaaatgtctcctgcactaggtttccataagaaccaagattttaaagaacatactggaatgccatatggtagccaagtatttaataggaacctgagtcagttattctgttgggcatggagatgcagagacaacaaagacataaaaacttaaggcttgtacctcttaacttttctttgaaaactagctagaagtcattttaatatgattaatgctaacattccactcaatatttataaacatattcacaaagtggtggtattccttgttctgaggactatatcccaagctggactagagtttaacatgcattccatactggtctcaaactgacagaattcctgcttcagcttctgcaattctgggactagaagcatggactacccaacccaggtattgttatttttaaatttcaggaaggggctggagaggtgactcaacagttaagggcacttgctacttttgcagaggacttggctttaggtcccagcatccacatggtggttcccaaacatgcataactctagtataccagggaatctgacaccctcttctggcctttacaggcaccaagaacacattgtgcacatccatacattcaggtgaaacactcatacacatgaaataaaacctaaaaaagaaaatattcaggaagatacagagcttgagatgaagtagcaagtctaaactggtgaacctggcaactgcaggagccttgatcagtaccacagcaaatgctcttgactctgttgtaagcaccccagttctacaccccaacctcatggtcttacccttcttaaagttgacctagttggtatgccttccatccagtttcttcctccacgtaatacttttgttaacatctctactctgttttttgccaagaaccagaaataattaatccctcttaatctctctctctctctctctctctctctctctctctctctctctctctctctctgctttgtatataataactctcctcccaactccacgttttattaacagtaactgtccatgggctgtgaagactgtccaaatgggctggttattttggactcattcattcaacagaaaaactaggacacattcctcacacagatatcttggaaaatccactcatataggaaaacaaagcagttcagcagctacagcaggactccaagtcaggagaaacaagttgcaatataaatgcaagaccattatcttttccaataatttaatttgccaaagggacactactcccaaacaacaaagaagagatagggcagcagcgcagcccacagcacactccacagcgtgagccacttggggggagtttataatagccatttacaatgtttttaactcttctgctctcctccccgacccctctctattcttttaaaggagatgttgctgtatgtatgcttgtgtgtgtgtgtgttctccctttacattagaaggaaatgaccacacaattgtagttattacagataagcaagtcagttggctgatgatgaatagcaccacaatgggctataaatattccatttccattgaatcacttggcacacttcaatattgttttctagacaatgcctatgtaactagaggacttaacaaggttaagaatcacatgttataaggaaaacactggactctccctagtcctccaggaatagactctacttcctgctggcagtggaggaagccattactgaatgtgctttgctgacagggcatggccatgacaagaacgaatgtctgagacccctgggaatgacaaaaaacttccctggtgagacttagagggatttcaaagcttccctctggtccagtgttgacagtgtgtgcaaaatcaagcaacagtaccttcctgagacagcctgaaactgctgcttagaaccactagttaacctcccctgctgtactggataaacacactgaggtactaggttattgtgtagttggtgccactgtatcagagtgcacacagcccacataacccgagctattctgttcctttgtctgggtatctgtcttttcttccttcccttacagtccttcttaggtttatggggctcaagccacactgatcatactaacttccaaacaagatgtgctcagacacacccttcttcctcctgtcagtgtctagctgagagtaaccaaagagggcatgagaattcacatggtgtatttcctcccagttgtattgctgtttgttacccctgtgtaccaactctgttattatcatcctcctgattttttttcaaagcatttggcttggagttcacgaggaaatactggtctaactgttactgctatactgttgaattgtttcctcttgttgctgttgccacctaaaaccctgtgattgcctggctatgaatgcccatcatcaagtgtcacctgcaatgcactctgtgctaccaaacactgtgtcaagaggtctatgtgtctttgatctgctttttacctctgctgtttggggttctggctcatagagaaaaatatttactgtctgtaagggaaaggcagtgcattccctaccttttgaacaaccagttgttgagatcctagcagtttgtcacaacctcacccactgagaacacttaggcagctttgggttctgggatagggtggtccatgtgtaacattagcctgtgaactgaaccagtgccctcctcgttgcacacctgacttgtctggctagcctgtattgggcattcatccctctccccaaggcatttgacatgcctgtctagctctgaaaccacttacccatgcctcaggaaagtggcacagcatttagcactatgtcacttctttttctaacttatgagtgtgacaattgaaatcggagatgactagaaactggcttgatagcagatatgagactcgatttggaggagggggtgctgcaaagtaggctggaaaaaataggaactccgtattttcttcaccaagccaacttggtgatattaagagaaggctcctggctgttttctaaaaggaaatgtgaacaacaagtggaaagttcatagtccatcaaattgggaaagcaaagtagtgtttcaagggcaaagcagagcagaagcccaaaggctgctcacttgactgtcataaaagggagaccatagacagaaaaaaatattgtagaaaatgagagcagccaccatgttagtaaatagccaatggcaagggagaaaccaaaagacctccatgtgcagcgccttcagaggtgctgcctcagttttcctcctgctggagcaagctaatctcaagttaatgggcctggagacctacttgccaggacagagtagactgtattagttggctttctgttgctgtgatgaaacacatgaacaaaagcaacctggggaggaaatgctttatttcagttcacagctcatagagggaagtcagtgctggaactaaaggcagaaatctggatgcagatgcagaaactgtgaacagatagtcacagtacctatgtgtatacatttataaaattgcactgcccatgagaaggcacgtgggaatttctacacagttctagaacctaagctaactggccataggttgaagacttacacatgtctttggtcacacctactgtgaatagacacatcagataggacttttctcagtatgaaccctgttttccttcataaagttccataaagttgaaaactgaaagtccttcagtaatcaagcttcttcataagcaaaccagggatggaaagacaaacagcttctgcagaaagggtgatttgggcacttgggtctactctccaggcctctcatattcccagatacccacagaaatctgagaaatattgcctgcagcttagaattctcttcatacctgtcctagtgatgtagggtgaaggagaaagatggtagttaatacctagataggcttatcgtatctgtgtcatcttgtagcagaaatctgaatacatctgtagaaaaggaaagcttctgggaatttcagaaaaggaaaaataaagaagatggatgtattgaagagctataaagaaaggaagctcctcagattggagcagttgagacaccaggaaagccttcttcaagctaaaattgatggaataaccaatatggctaaggggcttgggaggataattcgacaacctaaggagagtttgggatggattaaagaaacacaatttaaaagctgaggaacaaaaaatcaacataggttcttctagaccttgcccctcagtccactgcaaaatgtgacaagtaggtaaaacataaataagactggttttaagatattgactcttatagacgagcttgctatactattgtaaatatttgatttatttttaataataaaaatgtgctcaagaatggaaatagattaccatgcattacatcaattggcaggaaaatgttggttttctgtcagcacagaggctgcgctttaatctgctgctgtttcagccagcaactgtggctccacagttactggcctgattctctggcagtggcccggacactcaggcaactgtctggcaggaattctgttcccacatgcaccggcgatgtcgctgccaccaaataatagctcttaattaaatctctattgttctacttttcaataagactcgagagtcaaaagctggggtgaaaacctactagaaagagaggttgagtagcaacaagctgatcttctccctttgccaatgtctctgaaagggaacatccttccactctgccaaacaaaaaagttaaaaaacaaaacaacaacaacaaaaacatgccacataaggtccctccctactacctcctgtgcatctctgtatagtctaacaggcttcccctgactctctatgtttactatctgtcagctagttgctacctcaacctcctgacccaaggtcgattttatttaattaaggcaaacacaaacccaggttcacagtgtgattgaatatcttgcagcaggaaaacacttactaaatatgttagtgtcaaaaattctcacttggcaaggctgtgagtacatgttcaccattccaatgaagaagctgatgagaagtatggttgctgaatgagctcattctctaccttgcatgtttgtctttgactagatgaaagccaaatactttagcttctgtcataacatttgcttgttgccacttcattcattctatggtttccccctgcaaagcctatttctcaagcttcttggccatctagttttgaacagactatattcactaaagggactgggaagaaggaagcacttagggtaccccctttacttactctgaggctgacagcagccactcttctctctggttccagttcctcaaagactagtatcctcaatggctccgctcccatctaatagttagaaacttgcaaccattcactgctagaaccacccttgtaaagatataggaacgagcttgacttcaacagctgaaatcctcaatgattcattcacatactcattgagcttccaaaattctcttctgaagtgtctttcattcattgttctatcaaacaattgtgataaaatagataaacgtgtttctttgtttaggtggggtctggttagcttgttgctaagtgagaaatgggccagaatttattctatttctactttttctctttctaaatctaagttttaaaaaactacactcatacaaataagtgtagacgaacatgattgtttttcttgtaaaaaagcatccctcctttgaactccttgtgattgtattcaagggatacaatgcaccacagtcaatagggttttcttagaattatttttatttttaattatgtgtctctgtatgtatgccatgtgcatacaggtcaccatggaaacagaaaaaaaaaatgttggctcccctgaagttatagttaaaaaaggttgtgagccacccattgtgggttctagaaacagagcacaggctttggaagagcagcaagtactcttaacagatgagccatctttatatcccacaaaagtttttttcaaaataatacatcactgataattacattggatccttacttgatcttgtatagcattaaaaatctgaattagaagaaaatacttatagccaaggcatttggttcattaactttgcatagacttttttaaaaaacatatttgtttttatgtgtatggatgttttatctacatgtatatctgtgtaccatgtgtgtgagatacccaaagaggccagaagacagtgtcagatctcctgcaactagaactacaaattgcttatgtatagccactgagaatggaacccatggtctgtgctcataaccacagagccatctctccagcccctgctttctataattctatttgaggaaagataaactttatacacacactttgcaaattcttattgtgtacaccattactcttcaatttataagactcttatttaacttgagaaggaaatgagaaaatttttaaatgttaaatatagcaatgtttgttaagacagatctcactatatagccctgttttccatagaatgtaaatcaggctagcctcaatatgtagatcagaacagcctcttacttaaagtagttctcctgtctcacaagcaccgaggctgcagatatgagcaacaaatccagcacacttttgttttgatggtgacatggttttcaaaaatactcttatttaatcacaagttttagatagaccttcactatctggaaatgctgtacttgaaagattcagcctattcacctaacgtggatcaagtctcacttcccagcagtcacaaattctcggaagaaatctgattctattttactgcaaaaatttattgtgttcttaataaagtattttttaaatagaaaaaaactgatagacagcattttttaagatacactactaaaattatctgggattaaatcaatatggagctaatcaaaataaactctataatattgttaagataagagatcgggataaatattgccaattttctacctaatgaaaatataatgttttgctccaattgagttatttatgaagcaagaagcatggtgtttggtaaatgtattctggtgcttcactttaggaagtaactaaataagaatcaaatttttaaaagttgaagtaaattcacttattcagtacatattgccatcaaactatacttgtatactttatgaaaaagtatatactattgaaaattaatcagatgatttgccaactagcatgttttcttatgaatgggaaaaagaaacatttctaggatgaaataaaatacagatttactgtgcttgaaataaacatttcaaaacatattttggtaaaatggttatttctataaagtaacatttctcagatcccaaagaaaccatgtaagttttactcaattgatcttgaaatttttgaagtagcccagttatatttttttaataaataacagcagcatatactgccctggattttggaaagtgctctgtgttctcagtagtatttgcagtaaggataattatggaactttgctgcaatgaacttgaattttggtgttctgaagggtacttcaatgtccaatattttttactgttttgctttgttcttaagggaccttccctcagataaacagatggggaactgaggaaattgatcacctattctgataactgtataaattctcaatatgcccaagatgatgaaaatatagaattttgaagaacatgcttcactttgaaaagattattttaactttgagattataatataactacatcattttcctttcccctttcttccactaagccctcccatatgcccctcattgctctctttagaattcatggcctccttctcaatagttattgttacatacgtgtgtgtatatatacatccatatttatattcccaaatacatagatacacacttctcagtctgttaagggataatcattgttttgtttgtttgtttgtttgtttgtttgtttgtttgttggctttttcgagacagggtttctctgtattgttttggaggctgttgtggaactcactctgtagaccaggctggccttgaactcacagagatccacctgcctctgcctcccaagtgctgggactaaaggcatgcacccaccaatgcccggcagggataatcatttttattggataaccaattggtgtgcccttctctaggaaacacttctcccactctcagcattccttatttgccagtagttctctgtgtagagttgaggcctcatggttttctcccatccattctcgcatgtctcctgttgtggtctttgttcagctcatgtttaggcagtcatgttgctgagactttatgggtgtagtttctgacattactgtgcaacacagtctcacagcaaattccctgatcctctggctcttacaacgtttcttcccttctggaatcatttttgagccttagatgcaggagttgttttgtacatgtagcctttgggagtactttgcattttgattgagcagcactttctctaatggtcttatctgttgcaaagacaagtattcttgatgagagttgggaactacagttatctttggatataagaagaactacttagaatgtagttagggattatgctgatttagtaaaatggcagttgtatgctcttctttgagatccatgacttcactaaccctgagtaactggctaggtttccagtgccagatatgatttccctcttgtcaaaaaggtcttaacgccaagtacaggcctattgcttaccaccaaagtatgcaaaccactgcttcacattagagttaacttgtgtcatgctggtcatcggtgtccttcattggcatcataattaggtaggaccactggttgcttccctcctttggaagctagcatggcatcttctggtattagtcctcaaggagaagggttttaggtcagatccagataagttcccctgggtcctatgtccaaagagcatagtgtcttcagcaataggaacttaccttccaacacatgggaacaaggaaggacaatggcaaaatagtctataattttgggggaactctcttggataaacctgaccaacaactcacgagaaacttctcaacctagtgttggggttttgttaggtggtctatggctcttaatggagcatggaaagaaactttcatttcaaccatatatgtatatttatacacagaattacatcaattgtaggttttcttcttttttaattagatcactaataatatgattctttatgacttttcagatattcttactgaaagttgaccctcctctccttttgtatttatcttcctccctcctaattagagccccactccatttacccacactccacttttaaacacactgtgtataaaataggaaatcttaacaggtattagagtttgaatatgaaatttccccatagcctatgtgtttgaatatttggctctgttgacagtggttagggaaccttgaaacatggtacttggctggcagaggtggatcattggaagaagaatcctgagaattatagcccaactctatgtctggtctcattctctgcttcttggtccagtgtccatggcaggaactctgctacatacctctaccattacccagtgagctgctcctgtaggaatgcccaccccatgatagactgaaactgtgaaccaaaatagatctgtcctccagtcctagtatcattctgatgctgtgattaaaaacactgacccactgggcattggtggcacacacctttaatcccagcagccaggaggcagaggcaggtggatctctgtgaattcaaggccagcctggtctccagagtgaatgccaggataggctacaaagctacacagagaaaccctgtcttgaaaaacaaaaacaaaagtaaaaccactgacccaaagtaacttaggggatagatgagttttttcagcagaaaggtttcattaaaggaagtagggaagaaactcaagcaaggatccaaagtaaaatatataaaggaatgctgcctattacctcactcactgacccatgtttagctggttttcttatactgtccaggaacatgggctcatggaatggtgccattctcagtatgctggacctttctacgtcagttaataatcaagataatacctcagacatgcccacctgccaatctgatatgggtagtccctctattgagaacaccttgtaaggtaacttcaggctgtgccacattgataattaaagctaagacacctctcctaagttgcttctgtcagatattttgccacagaaataagaaaagtcactaagataccaggctatagtcatctgattaaacaataacacaggctcctctttcagagggcactcttgacatttatagtccagaaaacacttttacatggatgagaagaaatactaatgtgttttcagatgaaagtgtgagctcaaactctacctcagctactggatttttatgatagaaaattgtagacattggagacctaaaactgaataattaaaccatgcataaacctagaaaaatcaatatggtccaagttgaaggcctgcagagtctgggtccagcaaatggccctgtatgtagctattgctatttgtatgggtagagcatatgtctgtcctcatcaagcttggccaagttgtcctctcttggcatggtggttcatgcccataatctcagcacctgggaggctgaagtaagaggtttgctgtgaatatgagaccaatatggggtataaaataagaccctcaacaaaacaaaataaaggaaaaaggtagggatggaggttggaaagaagctggtttcaggcatagcttgcatgcttgagcttagaaacaacagggagtagttctagcttccatactgtttctagtttttgtctttaaagactgctgtgatccagtagactgctttaaatgccttggtcacagccacttcctgacttgggtgtgagctgaaaaattgcccattgtaaggtgccagggaacttcctttgcaatacaattaatgaccccttcaagaggtcattaaccacataatagtcattattctgagagtacactgagaaaagaatatctttcagatgttagcctaagtcacttcaatgatttttgcaattttactctaattttcaatccatcaaaattttattaatgactgaagtaatccaatatataaaatgttccttttaaatggaagttttaacatcacttctgtttattcattcaatcatcaaatagtaacttaataattgtgagtcatgctctcatgatgtcaaaacaaaaatgagttaaaagatggtgaacagatgagtggttgccagggctggcagggcaaaggtgtcagtgacacagggtataacacaaggcattagtggtaagagaacagttctgagttcaaaggcaaatgcaaaacgtgttggcaaactctttctgcaaagggtaaaaagtcactattttaataatgctacacttggagaaacaaccattagcaaaggaggggttgtctttgagttggttcactctgaaatacctgaaagactaacagctatagacagaacctcgacatttcaaatgctttatctagaatgaaattgagggccctggtgacaaagaaaagaggtaaagaagtctgtaaggagcatagaggaggaggttaagaaagagtacagaaagtgatatggctcctccatcttggaccaacagataagaaaaatacgaattctattgaggctgggttatgttaaatatttgtattaattgcccatggggaaaatctggactactgattgcttttgcaaatgaggttttattggcatgaagccacctctattcatttctgcattagcaccacaagagctgagttaaggaattgtaactgagatcatctggtcataagacctgacatacagttgtctgccccctgtccttttctaaagcattctgctgtttgtagtagtatacacttaaaatcccagaacttggaaggctaaggtaggaggatttccatgagctctgggtcagtgtggcctagataacaacacctcatctcaaacaagaaatgttttctgattcctgttttgtatccccagcgtgcacactcaatgtagctagaagaagcaacccaaggttgattttcagccactatttggggtggctaaaaacattttctgggccctcacacatctggggagctattttcaaataagagcagagaaattcaaagagttgtttacctaaggttatgcaagaaaaaggcattctaatttcttggtcaattagttttcacatcccctttgtttcttcacggatcatatagagcattttatttcatcctgcttttccttaaggtaggggacagtctaagtgatttatatgtacaaacttgactataggtttctgatgctcaccattcacccatgtaaaaactccagtctttcaacagctcatctagaaaactcttattcatctagtagattcaaaaccaaattccatcttgaagatgctgatttggttatgatctttctaatctgttttctattttctttagaataaaattgactttggggtttgaggcaaggactgtccttgaaatcagtattagctgagaatgaacttgaaccactgaacctcttgcctccacctcaggagtggtgggatttcatgtgtgtactactcaccatacccgatttatgtggggctgggattgtgaagcttggtagcatggtatcagctgaactacatccacagtccaatacacagtttttaggcaagcatgaagcaaggtagcttcagctacatagtgaattccagatcaggctgggctgcataagattctgcctcaaaaatagccaaaacattaatataaggaaattgatagttgttgcttatacctgctctggctaaaataatttttccttattttttattagttcaaattaggaaaaagcttgcttcacatgtcaatcccttctccctctccctcccctccccccactctccccctcaaccccctacctgccccccaccacatcacccctccactccccttgatggtggctacccaaagtccaccacgtcatcctgtgtcggacctaggccctgccccatgtgtccaagtcaagagtacatcccttcacatggcatgggttctcaaagtcccttcttaccaccagggaaaaatactaatccactaccaggggccccctagactgcagaggcctcctcattgacatccatgttcaggggtctgcatcagtcctgttctggcctcccagacagcagtctgaggtcaatgtgctcccccttgttcaggtcagctgtttctgtgggtttcaccagcctggtaccaacccctttgatcttcattcctccctctctgcaactgggttcaagagttcagttcagtgtatatctgtgggtgtctgcctctgtttccatcagccactggatgaaggctctaggatggcataaaaagtagtcatcagtctcattatagaggaaggacatttaggttctcctctccaccattgcctagattgtcagttcgtgtcatccttgtagatctctagaaatctccctagtgccagatctctccttggacctataatggctccctctgatatggtatctgtcatcttgctctcctctattcttcccccaactcaacatttctgctcctccatttcctcctctcccctcctcttctcctcctctcattctggcagctccctctcccctaccctcatgctcccaattagctcaggagttcctgtcccttcccattctctggggtctatgcattttcccctttgagtctttcttgttttctagtttctttggtgaagaggattgtatactggtaatcctttgctctatgtctaaaattaatatatgagtgagtacataccatgtttgtctttttgtgactaggttacctcacacaggatggtttcttctagtttcattcatttgtctggctgaaataattttataaatgaacctgaaatgcaaaatttagtagttctcctgtatttatgttttgttttgttttttgcaaatacatacattagaagtgtaagagaaggccctaagtaggatagctatctacatagcatttctcaaactggcattccataggaaatattcagaggaatgctatatacatatttctcttttcattcctcactaaataactttgggacacactaaccaaaatctgcagattgtctttctgctgaacattcccaaaacaccacatttcttttttatttctattttttatttaaattagaaacaagattattttacatgtcaatcccagttccctctccctctgctccccacctcccctcccccaaatagcaacctacctatgccatacactttctgctccccagggagggtaaggccttccatagggggtcttctgagtctgtcatatccattgggatacaacctaggcccactcccgtgtgtcttggctcaggaagtagccctctatgtggaacagacttttaaagtccattcctatgctaaggataagtactgatcaactacaagaggccctatagatttcccaggtctcctcactgacacccacattcatggggtctggatcagtcccatgctggtttcccagctatcagtctggggaccatcagctcccacttgttcaggtcagctatttctgtggatttcatcagcctggtcttgacctctttgctcatcactcctccttctctgcaactggatttcagttcagttcaaggtttagctgtgggtgtctgcttctacttccaccagctgctggatgaaggctctagcctggcatataagttagtcatcaatgtcattatcaggggagggcatttaaggcagactctcctctgttgcttagattagttggtatcatccttgtagaactccagacatttccctagtgcctgatttctctttaaatctatactggctccctctattatggtatctcttatcttgctcttctctattcttcccccaactgaactttcctgctccctcatgtcctcctcacccctcctctttccccttctcattctcctagctccttctccctttcccccatgctcccaatttgctcaggagttcttgtccctttccccttctccaggggaccatgtatgtctctcttagggtcatccttgtttactagcatctctggcggtgtggattgtaggctggtaatcctttatgtctaaaatccatatatgagtgagtacatatcatgtttgtctttttgtgattgggttatctcgctcagaatggtttcttctagttccatccatttgcctgtgaatttcaagactcaattgtttggtttttttttcctgctgagtagtactccattgtgtaaatgtaccacattttctctatccattcttcagttgagggcatctatgttgcttccaagttctggctattacaaatagtgctgctatgaacatcgttgaacagatgcccttgttgtatgaatgtgcttcttttgggtatatgcttaagagtggaattgctgggtcttgtggtagactcattcccattttcctgaggaatggccatactgatttccaaactagctgtaccagttggcactcccaccagcagtggagaagtgttcccctttctccacatcctctccagcataaactgtcattggtgtttttgattttacccattctgacaggagtaagatggtgtctcagaggtgttttgatttgcgtttccctgaaggctaaggatgttgaacactttcatatgtgtatttcatccattttagattcctctattgagaattgtctatttagttctgtaccccactttttaattgtattatttgatgttttgcaaactagtttcttgagttctctgtaaattttggggatcagccttctgttggatgtggccttggtgaatatcttttcccaatctgtgggctgccgttttggtcttgctggatgtatcctttgccttacagaagaagcttctcagtttcaggaggtcccaattatcaattgttgatctcagtgtctgtgctactgttgtaatgttcaggaagcagtctcttgtgccaatttgttcaagggtatctcccactttctcttctaataggttcagtgtgagtggatttatgttaaggtctttggtccatttggacttaagttttgtgcatggccatagacatggatctatctgcagccttctacactccaacatccagttatgtcagcaacatttgttgaagatgctttctgttttgtatagatttagcttctttatcaaaaaatcgggtggttgtaggtgtgtgggttaataccaactctattccattggtctacctgtctatttttatgccaataccaagctgttttcaggactatagctctgtaatagagcttgaagtcagggatggtgatgcctccagaagttcctttattgtccagagttgttttagctatcctgggtcttttgtttttccatataaagttgagaattgttctttcaagttctgtgaagaattgtgctgggattttgatggggattgcattgaatctgtagattgcttttggcaagattgccatttttactaggttgatcctacctatccaagaacatgggagatccttccattttctggtatcttctttaatttctttctttaaggactcaaaattcttatgatacaggtctttcacttttttggttagcattaccccaaggtattttatgttgtttgtggcaattgtaaaacgtgatgtttctctgatttctttctcagcacatttatcatccatatatagtagggctactgatttttgaaacaccacatttcattggcgacatcttttttatcatttttatttgaattagaaacaagattgatttacatgacaatcccagttcccttcaccctcccatcttcccctaccagccccctaactaaaaccctacctatcacataccctttcttctattcttcacctgactcaacctttctgctccctcatgacctctgcatccttcctcttattcccttgatctcaatttgctcaggggatcgtgaccctttccccttctccaggggacaatgtttgtctcctttagggtcctctttgtttactagtttctctggcagtgtggattgtaggttggtaatcctttactctatggctataaaccacatatgagtgagtacatatcatgtttgaatttttgtgattgggttaccttgttcagaatggtttcttctagttccatccattttcctgcaaatttcaagattccactgctttttcttctgagtagtactccattgtgtaaatgtaccacattttctctatccattcttcggttgagggtcatctaggctgcttccagtttctggctataacatcttcaacaaatggtgctggtataactggatgcggacatgtagaagactacagatagacccaagccttttaccttgcacaaaacttaagtcaaaatggatcaaagacctcaacataaacccagccacactgaaccttattagaagataaagtgggaaataccttcgaattaattggtacaggagactgcttcctgaacataacaccagtagcacaaacactgagatcaacaattgataaatgggacctcctgaaactgagaagcttctgttaggcaaaggacacagtcagcaagacaaaatggcagcccacagactgggaaaagatattcaccaaccccacatctgacagggctgatctccaaaatgtacaaagaactcaagaagctagtctccaaaacaccaaacaatccaattgaaatttagggtacagaactaaatagacaattctcaatagaggaatctaaaatggatgaaatacacataagaaagtgttcaacatccttagccatcagggaaatgcaaatcaaaataactctgagataccatcttactcctgtcagaacgggtaaaatcaaaaacactaatgacagtttatgctggagaggatgtggagaaaggggaacacttctccactgctgttgggagtgccaacttgtacagccactttggaaatcagtatggtgactcctcaagaaaatgggaatgagtctaccacaagacccagtaaaaggttcaggcattatgctggcctgctcctgttacctggtggaatccactcaggcaataccctggtcagcccaaggttccatgggaaagaagtctgcacacaggtgcagaggacccctttaaaagataggctcctgcacctttacgctctctctgccccttttctctctctctctctctctccctctccctctccccctgtctctctctctctccctgtctctctctctccccctgtctctctctctctgtgtgtgctttcccgtctctgtttccccactctgtctctctatggcgaccggccatggcggtcagccatttactctgttcctcttcttagtctccccattctaccggaccttataataaacttatagtcaatatgtctgtctcagcaattcctcttttcttctttttaaacaaaacaataacattttggcgcctggacatggaaaggctctgccctttataccttctccacgacccgctggcgggtgagtgttaggcaagggcaaccttacaacccacttccatctccgcttttcctggtactccctcctgcctgcagcagcctgagatgccggaactcaactcgccacttttccaactaagtatttctggaactcactgatctgcctattcgctacaatccggtaagatacccagaccgcttccatggggcagacccagcgctgttcactctgggtccatttttcggtttcgggccgggtgctctcagacagggcaatctatgcatttttcggccttgcccacgggaaatacatttttacgggatctttcggctactggcagcgagtaggtaaatgagcggagttctgcctcccattgggaactttctttcatctgggaatgtcccccattgttctgtttgttctttctctgactgtgtttcttcttggttggcaatgtctgcttgagatgctctgagagttttgtttgtttgctggtttgaaacttttctggcaattgagaatgtgcttacgggggtcgccatcgaccacgtggactaacctgggggccgccatcttggtcataaccacgtgacctaggcctacccactcagttcagtgacttccacaggcaagcactgccacctgacatcttgctttttcttctttcacttgttgggtgcatttcctaaaggtcaggcatgggatcccgctccaggagcggtgcttttttgcttttctcagttcggactgctgggtcctttttcggtttcgggacagctgtgtccccttcggggccaggcccctggtaactcccacgggcagacgtgcatccgtagaggagctttttgccgcttttccacttgcctcacccatgagaaatgcatagaggaacttttctggtttcatccaacaaacaggtaaacagacaaaagcggctttcggttgccgccgttttggtcatgtggcctacctgtaggcacacccagctccaatggcctatgccaacaaagcaaacctgtctaccagatttttgatttctgccagatctttttgctttttattttattttttgtctatgatttcttctttcactggctctgttgttcatggcttgtttactaaatactgtgcctttccagggccctctgtttaagtctaccctgtctctttaaatctcctgtctatttgctacaatgtatggatcagagattacattctggttctcctttactgttatccagtcctgcttgtctttgtacctgtaatttaactttatacttatctagcttatatacaatttaaattaaactatactaagtctcatatttctaaattgctatatatctttaaatgatggtaaacatttaaggtcataaaggtataatttaactatgcttaaaatataagccaagtctatacaacttaaatttaactcatgtatctttaaatgatgatgaaagtttacaatcatataggtctatttcaaactaacaaaatatttataccactcagtctatcctataagccatttacaaaggtacagcttttattacaaaaaggatttttctctaactaaaggcaaacttaactgctaagatcctaagcagacagccctcaaatgctcagagatctagagaatatggcatttaaaatgttttgttagaaagctttttataacagagagataggccagctgctggccccatcccatttcctccgagaaaactgatgggcactgaagaaacttcatctcgactcagtgacaacgctggtcactgagcaaccctgcccttcacctcaactggtacaaagtattccagaccatggacaagaggacaacggaatcgactttcccggcgttgcttgggccaacggtaggcaagtcttcccaaagtctctaatccacaggtcacaagttatcagcaagaaggcaggtgtcctgcaacccgctactatggatggaggaccttggggatggctgtccatgcagcctgctggcaagtctttaatcattgttattctttaatcattgattcaggtaaaatcttatccttctcaagaactctgatgcttttgacgactgatagtcttgccagcttaaagcaaaacagattccagtaacaggtattttagggtttatgtatgtgaatataaaaaagtctaagatgtatgaaggtctgagaatgtagttacaaaggcctgaggatataaaggcgtaaatgatgataaaatgagttgagacattaaaaagaataaaaaatgttcctgatttctctatttctcatgctactgttcatagtctacaataccactataggatcataactacaaggtcaaggttaagatgcttttcattgtcctaaaaaatctgtctgttttaaaatggtaatactttcagccaagttgcttctaacatgaatatgcttctaacatgtctaatacttatgtttccataaactctaaggattcttgtaagtaccagggagccgaatcagatccaaacaggtcaggttcactccaggtaatattcaatctttccctggtcccaaattcccttcactcatcttgggacacctcgggaacccctccctcatcttacaatcttcccctcaaatgacaggacctaagaaaaaattttttctaaactcaaccttgtcttctgctctgtcaacatcttgccaggtctaagaggcgccagggagttccatacagcctggactgcaatgaaacaaccagcttccccaggacgtggcagcaccccaaccttctcgggtcccccaaagatggtcaacgccccccacgtcagcaggaagcagtcttaagaattcgacgcccttattccttaacctgccatgtctaaacaccccacctttttttaataataagtagaggtgggaatgaaaggttcaggcattatgctggcctgcccctgttacctggtggaatccactcaggcaataccctggtcagcccaaggttccatgggaaagaagtctgcacacaggtgcagaggacccctttaaaagataggcccctgcacctttacgctctctctgcccctttactctctctctctccctctctctctccccctgtctctctctctgtgtgtgtgctctcccgtctctgtttccccgctctgtctctctatggcgaccggccatggcggtcagccatttaccctgttcctcttcttagtctccccattctaccggaccttataataaacttatagtcaatatgtctgtctcagtatttctcttttcttctttttaaacaaaagaataacacccagcaattccactcctaggcatatacccaaaagaagcacattcatacaacaaggacatctgttcaatgatgttcatagcagcactatttgtaatagtcattaatgacatcttagaaagttccccatttccacttcctccattcttagaaactgagacattgggccccaaatcatgggtgttatatccctgacatttctactagcaactctgaataatgttgaatttcttctcctttactctgacctttactcagactcacagacacctctcacccagtgatgaagccagaaactcttgactaggtccccctcatctgtactgattaacctccatgattctaaactcgggggaaagctatggctagtggctagtgtttgtccttcctgccagaagagccttggtcatctagatacaggaagccaactctccttgtaccagcttcacatcctaggaaccagaggagtgaaagaatgaactagccaagtccaaaataagggttttttgttttgttttgttttgtttttttgttttgtttttgtttttgttttttttttttgtttttgtttttcgaggcagggtttctctgtgtagctttggagcctatcctggcactcattctggagtccagactggcctcgaactcacagagatctgcctgcttctgcctctgctgggattaaagatgtgcaccaccaatgcccggcaccaaaataagtattttaggactttcattgtggctcgatgttagagcacagggccctaggttcgatcctcaacacaagaaaaataaaggtccatactgatgccatttataaatttctatgagcatataaattccctcttttcagaatcaaaatggctgctcctatcaccttctgtctccaccctgagagagggagaagctggaattctcattatctccctaaatcctacttaatctctgctttgacaggtacacagttagtcacctcctaggagtccaagggcattaactattttgtaaaaagtgttgagcatagtttgtggaatggaacatagtttccataaaaggaagctattatcctgactaattgttttaatctccctcattaccttaaagaccataaagacagggacagagtcatgtttccttgtatccccctagtaattagtgcattgtctggctcatagttggcttaataaatgtttattgaagaaatgaatttgcttatttcacatttttctttttcctatgccctatggaccccatttggttagaataataattgccatttgaagccaccatttatatcattgatctgaattccactaaaaaatgcaaccttgtatatgcaggagaaacagagtttgaaaatccctcttacatgtgtctggtacctcagaattcccattcaaaacctgatcagtctgttgactaatgcacaatctgccacaccaaaaccaggagttcctgatgacaagttccacagactgaggcgataacttcaaaagaaggaggtcttctggaaatggttgtggaactctcagctggagaaaaatattgagccgtagttctcatggcaatctctgttcttctattctttcttttttattttattttataagaaacaagcttcttttatatgtcaatcccagttccctctcccacccctcctcccctgccccccaaccccatcacaacccctttctgctccccagggagggtgaggccttccatgggggatctttaaagtctgtcatatcatttggagcagggcctagactctccgctgtgtgtctagtctgagagagtgctggagcccatgtggagagggctcccaaagtccattcatatactagggataaatactgatctaccagaggccccgtagagggcccagacctccaaactgacacccttgctcagggggtctagaacagtcctatgctggtttctcagctatcagtctggggtccatgagcagccccttgttcgggtcagctgtccatgtgggtttctccagtctggttctgacccctttgctcatcactcctcgctctctgcaactggattccagagttcagctctgtgtttagctgtgggtatctgcctccacttccatcagctactggatgaaggctgtagttctcatattcacgaaatgttcctgaaagcctacattgacattttaagtgaaaggtatagataagaaaccatcatctcagatcgggtcactagccatgacctcatctccagaaaaaaacaatgttttccaaatcattcacatcattcttataagtacaaatagtaaaaactttcccaacaataaaatctcatatgtctgtacatgtgtcgagagtgggcttaagtgtctgctaacaaaagcttttaataagaaagcgttgaaacagttaaaatagctcaatatttcaaaaaactcacaagacctaggtaatagatgttaaataataactgaccataaaaatatataaatttgatttaaaaccaagaatggttctatgttttgattaacaaaggacaattttgtgttttgattaagtctggatgatttcatgttttagatttctgtgtcactgtgccaagtaacaataatgtcatatgtttgggtttgtttaacaaaaacatctcctgagaaaatatctttataaaaaagacttgtttgagaactgcaaaatacactcagattcaaattgcctctgtgtttgtttctgtttgtcaccactgaattcttacccacctagtctttgaggactctcatcccagggactcccatacctggctgggatggtccgtgcaacaatctctgtctacactgtcacatgcatatggagttagattggccatacttcattgaaccctgcaagtcttgaattcaacttcaggttcctccaagcaggactggagttaatcagcctttgctcacatccaggtgatattggcagttgggagttcttcaatgccacctgggagcagggaataacacagcccaagcttgaagctgagcacacaagaggagttcccatgtggtgagattaggggtagcaaatacttccctcacccttgcatccctctgtgctgcccaagagaacttttttcagtaatgaaatcctctcatcctttgtgccacccaatatggagctgctattgacatgtgtctatttagcacttgagatatgactcttaccctgaagaactgaatccttttaataccagggaactttcaatttaagtagtcatacaaggtcagggcttactcacagtacagctccagccacaggagaggattttgaaggaaaacctaaactgaggtccataggtcctatgcaagaacctcagtttcttaatcagaaacatcttaacacaaatctgttatgttttcatgaaggctttttttgtaaactgtgacaaattgtcacaaaatatagtattgtaaaacagtataaatgcattctcttagagttcttaagtcagaaattagtttttaaggtctaattcattttaagggttctaggaatggctcctcggcttctagaagaagctacacccttggcattgcttgtcattcctgggcagatgcatacctgcatagtccaggaaaattgcctcaaaacgtctagaatgagaagatggagaagactgtcacaaaatactgtcatcaatatatgactttattacataaccacatagcatctatagatgtcaatacaacaatgggccttctgactcttcctcacaaattgaggagctgctcctaaggccacatgtctttctgagaagtcaatgacttatgatggttgctgaaagaagggtgtcatttttattaaatgacgttgccatttcaagtttatgtaggatgaaaaaaattctcagaggaaaaaggttagaagtaacaggaggtagattaattaaagtgcacttgtatgaaactatcaacaatgaaataaacaagggaaacgatccttaattcagtcatatctataaaatctcttttgcccaacaagctaacattcacagattataagaattagtagctggttatttctggaaggtatttgcaacattgttgcaaacaaattctgccacagaaatgtcatatattctattgatgctatgtaaaattcctaacttcccacttgaggtcacaatatttgatccatttccatataggcatttgaaagagtggcgatttgacaaatttagaacttgtggcagagacagtttttggagcaaatggtgtttttccagaaatatcttgatacagttcaattttctagagttcacttttcatcagcaaggaaaaggggaaagctctctcctcctcctgtgaaatgcatccaatcgttcttgtttgccagtggaatgatttccagttactaaagggcccaagttgctttaataattcgaatagttgtaaaagttaaaaaatgccatgccatttgaattttcagggatgtgtaagagaagcaaacaaaaaaacaaaacctcactaactccaggcatatgtgagcaggagaccaggaaaggaggctgagaaccaatgtgtaagggatggacagaaactcacctggaataggtgagtagtaagtatatttcatacaaaattgaaaggagtcatttgtaagttttcttgtaagtctgagcctcgccttttataggcaaagaaactaagtcttggaaaacaatctaaaagtcacaaaactatggaaacttctcaggtattttggaatctgcagagacctaactgatagcagaaggttggtgtgaaggcatgcacctgtagttccagctactcaggagacagaggcgcagcctgggctatgtttagaaaaaccttatctctaaaaatggaaagaagggaggaggaaagaagttgagaaaatcaaagattgtagagtacagaactgcatagcaaggagcagatggtagtgctgtgtgcactggtggttttctctctagctcccccttgcacagtgcctgaagtaaataccctacatatccattgcagagtcacactggtcttcaatgtgaagctattaagtgtgactctgtaagaacaagacaggctgcagatatgttatgagaagtagtagaaaaggcagcctggccaagaccacacaaacatggctatctcattagcctttaaaatcaagcccagaaaatttggtctctgggggacccaaccacaaggtgagttcctggcagagcacatggcttactgccaaatgaagattcccctaaaccaaaatcatagacatatgagagacaattaaagtcatgattgaatattttgaaaaataatgacatcttctaattaagacataattattagatttatgagtgatatatcatacttgcagaggttgagtatcccttgtctgaaatgcttggaaccaaaagtagttgagtagccctaatgttttttgcaatagtgcagtgtgacaaaaaatttaaatcattttattatctagcaatatttttactgtgtctcttttctgagaggacaaataaacttgattggtgtcaaaatgatgtgccataataggctacaactataagcctataccattttggaaaagaaatatttgtatatacatctaaaaatcacttctagaaaaacttatcaggctattatgattgactgactgacctctgggaaatgaaattgacaaacaagattatggacattcatgttggattctgtctccgtatttctcacattgcattttgcaatgagtataaaacaactatacgtattggtgtatatatagcatattagttatttatcttatggctgtaagaaaacatctgacaaaacaacttaagggagggagagtttatacagcctcactgtttcagagtaagatccaatatagcaaggaaatcatggagacaggatcttgaggtgtctggtcatgttgcctctagagttccgaagcagagtgttcatgctcagctacatttctgctttttattcagtctgagatcctagcccatggaacagtactactcatatttaagatgcgtctttttaccttcattaacctaatgaagaaaatccttcaaaagcatgctttcttagtgtttctattgatctaaagagacaagatggccacagcaactcttataaggaaaacatttaactggagacgggtggcttgctcacaatttcagaggttcagttcattatcatcacgattggagcaaggtggcatgtcttgatgacatacttccccctacaaggccacacctactcctaaaagtcacacctccaactaatgccactccctttggggaccattttctttcaaaccaccacattccactcattggccctctcaaagtgtccaatgacaggtacaagctcagaacaatttagtgataacatgacacaatggaggcaaggctccaacaggctttggaagtgactcactagtcacagggccaataccagtcactttactctgatagctactgagagaaaatatcacaacccaattgttaaccatataaatttatctctaaaaatcaccatcataaattcagactggatttatccagatcaaaacaacctaatgagaaggagaaagaccagcatgagcgagtaggaagcctagaagaggtgagctggaagtgaggatggggatgggttcggatgagtttcatgaatttaggcagaatcacagctcctccatcaccttcctcactacagttaaggagaatagacaagatcagaccaataaggttcattgtgaattctcaagcagcctgcaaataggcaccaactggttgtccaatgcaaaatggtcattcctgaaaacatgcatgcaagtaaatatagcgtggctgagcagttacatttgggaatatatatgtatctaaatatacatatatgaatgcagcaatacttaatgaaaaaagagaccatgaatttgaacaacaccaaaggaggatatttggagattttagaaggaggaaagggaagagaggaatttggtaattatattataatctcaaaaataaaagtataatttttaaaaatttaaggttgcctcatttcctgcttgtaaccttttcaaagcctgttattgcctatagagctaatctgttgagatgcttttttggaacacaataagataaagtcagactttttgagggcattatattaaacaccaaatcaattcgttaatttttatagctcttaagaaatataatgagactagattgctttaagaaggagtttctataaagataaaaacatagctgtggaaccaaaagtcctgagttcaaaacctagtgttagcagattaggtggcactaggcaacttaccacaaaagcccagaacctgtgctggagtaatgccataaaaattaactgaggagcctaaagagatggctcagccattaaaagcatatcctctcttctaagataagagttcagtttccatcattcaaattaggtggctcacatcacctgtaactccagctccagtcatctgagactgtcttctggcctccgtgggcactcattgcatatgacatacacacataaacatacataaaagaaatctttaaaataagattactagatgagagtaaaatgcaatcagcccctagaaaaagttttcttccctcaagagtttgaaaatttgcacacgtacacacacacacacacacacacacacacacacacacacacacacacgaatgccttaggaagcttcataaacacagaagcaaatcgtgtgtcctggcaatggctccatagaatgagtgctgctttctttggtggcatatgctgtactcaagaatgatgaggattaagaacttctacaaagcatagcagtcgcctccaagatgccttttgcactttccagcagagcactaccactgtgactctcctctaaaacacaatgaacaagcatcaacttcgttcccatagacaaatagggttattcatctccactgtgggaactaagaaaaagaggtaatagaatttctttattagtatcactattatttcataagaagggatgggaaccttgccctcttcagacactaaatgcgttagacaaggttgggaaatgaggactgaagaccaccaccactgactggagatttgccatcctcccacccccaaatctcttagtatcttgcagaggatctaagtgggctagaagctgtgagaacaactagaaaatggggtcagggaacctgcattctgggcaatgatacattatatgaccttgagccacaattttctcatcaagctacagtagtagtcaggagctaatttatagacttaaggttaagttcctacttatcatgattcacttaattttttctttttagctatgtttttcttatgtattcccttgatcataccttaagcactcttgtgctatgctttggactctggcttcaacaggatttaccatctagaaaactttggaaacccctataaactctttagcctcaatctcaccacgcctgaatgataccaaacagtccatggaggtatcaaataagttcatatgcagtgcttagcaaatactaaaaagtattattatttattgttggtattatttctccacaatattctttatttcaactctcatagacttgacccaaatgtctaggaatacatttattttattttaattttcattacctgttgcttattttgtgcatatggccacatgtcacttgtgtgactggaagtcatagtggaggttggttctctcactccaccctgtgtgtttcagagatcaaatccatgtcagcaggcttagcagcatcctaagctaccttggtagcacccaaattggattttctgtattgtctccaaatgaaaatgaaatatttaagtatttgttagattgtacttgaacaagtaggctgagtatatgcaaggaacacttgctggttgcctcatgttgatgaggtaaaactatagattatgagctgtggtgcctaggcagggagtcagttctttaacacatcaaggttcacattctaaagttggttctcatataatattatagacagttaaaagggggatgttgctttttctccataacacggaggcataatctctgtaacactttaacttacagctataagaaaactgtccatgtggctgggcagtggtggtgcatgcctttatcccagcactggggaggcagaggcaggtggatctccatgagactgaggccagcctggtctacaaagcaagttccagaactagctccaaagctacacagagaaaccctgtctagaaaaaaaaaaagaaaagaaaactgtccatgtataagatttattggtacaggcttgtaattccaattaatcctcaagtaggctgagacaggaggatcacaaattttaaggcttacctagtatctaggacaagttcaaggccactcaaacattctgtagtacaaggcatgagaaagggatggggtggggacagtttgtgaagtagctcaataatagaattgtttttttgtctgcctcaggtcctaggtacaatgcccagtgcaggtctggggatttagaaacaaaacctggccacatgactgcaattatcagcttcagatatgaaagacatgcagggtgggtcaactttaaaacctaagacatgagctctttctgggatgaaaatggttttaatgggcttatcttcctccaaaagaaacagtcaaagaaagtagtccacactcacacaattccagattggttcctttgggtatggaaagtagggattggtgcattttcttgtgagaactgacagatgaaagaggaggctcatagtttctctatcatggtttccaaggctgagtagaaaaagctgggtcattctgcccccaagctactctgtttcctaggccttctctgtgggggcagtaccccatgatcaatgcagatgttgtttttgtctttcatgtatgatctggtcatggctgagtcacagtacctagtaagctcttcaggtcggaattccagacttctttcccaccatgaccatcccagaccaaagtacagagcaagttctcagaaatgacctgttcagctttttatcccaaaagatattatttcttagccaacccatattcctcatcagtggtgcctcagccatctatctagagcacaaacaccaggacagacaggaattgttttattcagtagtacatctccacagccctagatggtgctggaaatgctttaggagggcaagaagacttggattttactagaactctcatgatgcctggactatcctccctcttcctcaggaacacaagaagagatttctgtatttctctcaatgatcactggactccgaagtactacaggaatttatcaaagactatgaactgaagccaatacttgtggccaggaatggacaaacaatcaattcaaactctgcctactgccagttttcctatgtaaagatttacagaaacacggccggcctatttgtttacatgggctcgatagcagctttccggctgcaataatggagtgaagtagttacaaccatctggcttacaaggccccaaaatgtttactttctggcatttcacagaagaaacttgctgacctctgctctagtttgaacagcaagacgacaagcaactctggttttcaaaagaaaaagaggaaaaatctcaggctcaggaaaaatcctatttcatgatactttaatactgggaaatattcttgatatgttctatatgaatatgtaaaagcatatgcatgacatttttctacatttaagtctctcaacagctgggagaagtaagcagggcaattttagccttgtttcacaaatggaggaataaaaaaataaataaaataaaaactaagtagtacatgctgaaagagaaattgttttaacctgggtattgtagctcatgcccacaggagaataaggagtataaggtcatcctcagttacatattgagttcaatgctagcctgggaaaaacatgtcacaagagaaaaaaagaataagagaaggagtggaggaggagagagaaagaggggaaagaaataaggaaggaaataaattaatttacaaccagggtcaaatctggttctttccatgacactcaataactgaagaaaacctaaaacttctgccctgaatcccttttccttctgcactagagggatgatccctggaggcctcggatggctttggagagttctacttcccacattcccactctggagatgttataattctgctacctagctgtttgcttcatttaagctttttaaagttatgcaatagcattatactatttctgctccaaacctatcagtagaatgaacacattatgatagcccatagttccctcagtaagctttcattgtcagtatgctcgcatgggaagacaagctattggcatattcttccatgtgtcccaatacaccccaattcaagttttattacaaaatgtttatattaagtttggtcactttctagtctctagacagtacaagggccagaatatgtgatggaagatcctgtcatagcctcttcatttcaggctcttcattttttcctaaagaacaatggttcctaataagtcaagtggttttagcacatcttctacggaccctttaatctagcaggacagtagaaaggcaacatcagacacagaaaacaactcaaaaccaatacagttgccagagacttgggatctggtcacaggcacaagatggtcagaaaagggcagagctgtgattcctgagccttctggagcagtgtgtcacctggagagtctacaacacacagactggctagcctcagcagagttggtttggttggcaggttgtggacctgactggctgcttgcatttctggctagttccaaggtggtgttgatgcctttgattctctggcagcactaaaagggtcatgctgtgtctggagtctagacaacaggagaactcctgtggtgtcaataggcgcagaattctcccatttgatgtctcaaaacacagattcagatttggtaattctggaggaaaagggttccgcatttataatcagctccaggaattgtggacttggctgatctggcccccatcaactggctactggcaaggaaactcttgcaagtggaactatttgggagtttctgagcagttaagcatgctgcaagactttaattttgtatcaacggttttgctattttcctgaaggcaatgccttttctggtcttcctcgttgctgtttttcttttaaactcaagtgtatactttcatctactcctggtagctgtgaacataacatcattaagttgagagttaagcatcacaaatataggttggtgtcagcctattggattctagtttgggctgcagttctaaaggtgtaaaacagtggatattttatagaacctttggtctcagtttcctcagcttcaaagtgatgtggtggtctgctttaaatgacctttaaaataccttaaaacaaccaaagattccatcacattaaatgctaacaaacatatcaaaaagaaataatacgagtgctgccacctttgggtggaacacataacttcacctggatcacacacaactttcccaatctgacatcttgcaaaatttcatctcctttagtcccaatacctacttaatgcttattccatgtaattgcaattcatagtgatttctttcaacatgtaagttcagagataaacagagtgagtttgatttcaatatcattgtccttacatatattgaaattttatagcctagttaaatgatttgtggaccccccctccattttcatggcttccatggtttcacaaaacctgaagtacactgatttataatgcatctgaatttgaattactggttggttagtaactgaatattctcaagaatgcactttggctttggattaaaattagaacctcatttttcttgaccattctcccttcttactgtgctctttggcaaaccccttaacttccccgtgtcacatatttccacattttgggaaaggtgtgtctcagttcacttcctgttgcctgtggatcaagatgtagaattctcagctacctctctagcttgtctgcctgcaggcttgcttgcttcctgtcatgacaacaaaggactaaacagtaagccagctccaattaaatgttttcctttataagagttgccattgtcatggagtctcttcccagcaatagaaaccctaagacattctccatcacgccatttctgagggttaggagaatgacagcacattagaatgtgcttgtaagacagtttctgtcctgcctggtcccacagctgtttagtcccaaataaacatataaacatacagaggtttatattaattataaactgtttggctgatggctacgtcttcttactggctcactctctcttcattattaacccacttttattaattatgtattgctataagctgtggcttacctgtaatgctccagttggttactcctttagtagctacatggcatctttttgtccactctctgtgtttctcttcccagtcttctcctagtctagtagtcacacctatatgtcctgcctgactacatgctgcttgtccattggctgaaacagctttattcatcaaccaataagagaaacagatattcatacagaaggacatcccccatcagctggtctacaatccaaaaagaatccttactggacatcaacaatctccgtgtggagacctagatttttgacttttagtctccagaactaaaataataaaaaaaacctattacttattagttatgaatgcttggctttagtgtaggtttgtttcttgctagttcttataacataatctgtttttcttcatctaccttttgcttggtgattttcacctttctttccttctgtatatcttactttcactacttctggcatctggctggctggcccctctttctccctccttctctcttgttctctcctcctcctcccactcttcttcagcctagatttctcctaattattctctctgctcaccagccctgcctgtccttctttctgcctagctgttgacctttcagctctttattaaaccaatcaggtgccttatgcaggtaaagtacaacaaatgcaatacctctacataattgaacaaatgcaggataaacaatcgtaacatatctttacatcataaacaaaggcagcagaaacaaatgtaatacacctttacacatttaaagtaatattcagtaacataaacaaatgtgaaacatctttatatagttaaatatttcacaacatacaaaataactaaatgtatataaatcctgagtggggtttggaaagtatcattttttctcctctcatattatcccctatcctgatatacaaaatgctgaatttattgtaaatatgagatcacttccatcaggataataaaatggaaaaaagccaatttcttgcatattagcaacaagcttccacctgcacactatgttccaagtgtacaaggacttcagatttggaaataattgtgaatgaatagaatacacatgcaaggaaagtgttgttgggaatttctactgacatctgcatgtagcattcagaaggaagacccctggcagacccaccatattggcagacatgcccagacatagaaatcatcatgcttgggcttataacccacaggtggaatacagttctccataatcattttcttatcaatgaaaatgactgtggtgcaaatgttacctcttgcatcagagagaggacaatctttaatccttaatcctttatatgcaatccattatatgcaatctcaaagaaagaagcaattttttatcaggagaggtacttctgtgaggaattcttgccccatgaactgaaacctgggtgtcccaatgaaaagttgattcttttggcatcaccaacaataaaataagtgctaagatcaatgcttttttacaacattctagcaacattctcccaatcactttccaactctacttttgatctcttcttttcttgatcatttccttcaagctgctcagctctctgctaatgccattatgggcctcttgctactctttgttttgtttttgaattctaggaacccccaccactccctacatctgttaatggaaaacatttctttatgagtttttttcatgttctggtaagttctatgacacaatacactaaccactctcggttttggactgtcattccaaagatgtttggaaaaatgactccttccagagtgaagccacacaaagtcatgttccatagactcagggtttttctcctatcattccatacactgctctaggaatattagtaatatgggaatcaacattttaacttgccatcctagtactgagggatagaggcaggaaaatagtgtagtcaaagccagcttgggctacatagcaattttctggggagccgggactacatagtgagactctttctcaaataaactaaaataatttaaaatcccagtgcagtgaagagtacactgtccattaacgcagactcggggccttcattcatggaactggagcagggaaggagggagggagagatagatagatagatagatagatagatagatagatagatagatagatagatagtactccagtggattcatcttgatggccctcaaacaacacaaaatagtcaattttgggaaaacgtgtattgaggtcggctgtggtattacacacctgtaatcccagcactcagcaggtagaagcaggaggggacaaggctatgtttgaagccagcctagtttatacagtcagtctcaagccatccaggactatacagagaaaccctgtcggcaccaaacacacttggtgatcacttactgcatacatagtagacacttctgttcatgctgaagatccctcaggagtgagcaatgcagagcagcatggagagaaagcattcaaatgcttacattcagctttttgttttaaataagtttattaaaagatggttttggagattatagttcggtaaataaatatttactttcataacccaaaccaaaatggaaaactgctatatcgggtaaagttactggttattgtttttaatgcttctttttggagtgtttttattttatccgcatgtgtttgagtatatgtatgggcaccatgagcattcaagagcctgcagaagtcaaaagagggcatcatcagatctcctgaaaccggagttgcaagagcttgtgagcttccctgtagacgttgggaatggaatctggatcttctgcaagagcagtaagaactttcaaccactgaggcattcctccagccccaatccttaacttctttaaaacagtcctattttctctattttgagattggagtaaaaacagcaagagagttgtagacagcttcttaaagatgaatttatgtgcatttgtctgtgctggttggagtgtaggtatgccatatgtacacaggtggctacagaggccagaagaggcctttggatccctctgcaaaaaaaaaaaaatagagttacaggaagttgtaagatgcttgaaattggtgacgggaactgaactagttcctctgcaagagcagtaagaactcttaagtgttgagccatttctccagcccgaaaccacagaccaattcaggttttatttcattgatacacaactgagttgattttcatgaccatttacagtcttatttattcataaatgctatgtaactgccattttttctgtgaaagcaaacatctcatacacttgtcttcagttccctgtgcataggagtcaactttctccagaagacgtatctctttttcaaatgtggtaagtgaactcaattcctcactggacttttggcatctaacacggtataaaaggtctcagcattgtaagtgtaggaagggtgggggcaacccaatgacatcacactttcatggaatgaataggtttctctcagatagcagctatttttgaaacacaacagtcagaagggaagggccagtttcagaaaatcaacagccccagtacccactcattcagtcataggcctcagggccctgagaaagtcatcttgccaaaccgtggcttcaaatgctctaacattatgcaaaatgcattgttatctccccaagaggtgtctagaaagacagaaacatagtcataattgtaatcgtatttgcaaccagaaaaatgagtgtagagatgggtcaaagggggcttttcatttccctcaacaccactgtgtacgagaaacagcagcagcctcagatattgcctgtactttttcttgatggggccctgttgacaatagactgtccttgctgtgtttattgtttttattagctcaatcaacacaaaacataagcaacagtagacacaaacctcattttatgcgtgcaagggaatgataagaagagctgtccagggagtcactgcatttctaatatcttatgacaaaaaaacaagtgatagtggtataaatgccaggcccttcagtcgtccccattctacacatggacctcaacgaattttccaataggctacttccagacaagaggaatcacacaagcattatctgaagcaaagtaaaacacacctattagatgctaaggaccagtgtcatgacattcttagagctggatctcaaacagatctcagaggtaggttatactggggtaggcatggtgacacacttcaggaggcccaggaaaaagaaccacaagttttcaggtagctttgatacatatatatatatatatatatatatatatatatatatatatattctaatcctaatagttcttttgaggatataattcatttgtaggtagcaaggagctccctgtagtcaccaactcaccaactcctttttgttttccaaacaggaaaatcaaaattgtaaacttctctattaacaaataatgcactctagcaaaactcctttgtgttgacagatctcaaaaagggatgcagacacatataagcagcatggatagaataagaaacttgaaattatctgcattcatccatgttgctagtgaatgaatgtttatgggttctttgctctttcaggcacttcgggtaggagtagaggaagctgctattgagatggactctgtccttaccccttgtggccttcccttcctttacttcagtttgccaaaagcaccaagacatttctttacttaatccaaaccaactttgttccattctctgaaacaactttccagtgaacttgatacatggagttcctttgcttcaaatatttatagtcccttgaggtggttacaaatgacactgtccttataattctcatccagcttctattggaggggtccttctgaacaaagaatgtgatggatgtctctgttctggcctctggtggtaccatgtttctgtttcctaggacttgtcacactattctgatctgtttccctcatgggactacaagtttcttggtaaaatgaactgtgttttagttactttgaaaatattagagcctggtacagtattaggaatagaatgagcccttgttaaatatgtgtacaatctggggctattgttcagtggtacagtgtgtgattagcatgttcaaggtcctatgcttggtctccagaaccacagaaagaaagaaaataaaactttttatggatgtttcagtagtacatgcacaaaaattcagaggttagtgtggtctctctaccagaatggcaggcaaattcatgagcaggacctgttcttaagtgaaaaaagccagactcagaaagacaaacaccagaatccagtgagatgactcagcaggcaaggacacctaacaatctgtgttgatccccgggccccacatggtggaatcagagaactagtttctacaggttgtcttcagatccccccttatgtactatggtaggcacatgcataagttcatgtatacacgtacatacaaaacaaaacaaacaactatacaaacaaatgtaagacaattactatgtatttctccctcatatgtagaacctaaatttaaagttatttgtatagatatggatatatatctctttataggggtatgtttatgggtcacaaagctaggaagagaggaagacctcataagggagacaggatatgaaaaccagtattggaatacatgtaataggaaaactgaagtttgggctgactgtgggtagaaagggagccagctggaaagggatatggaacgcagaggatggcagtgggggaggagggcaatagatgaaaacaaagcaaaattaattgtacatgcatgaagatgttacgataaagttcattactttgtattttaacctgaaaaataatttaaaaagtaaaaacttgtctttttaaaaagcaaaaataaaacaaacaaacaaataaaacaacaacaggaacgaggttatcaggtcagaagcaagtgagatagctgaatgggtaaaattccttgccacttaggcctgataacttgagttcaaatagcataacctatctgcttgctcttcttcctccaccgtcatgtgccctacacctgactcacctcctcaccatgtgactttcagaatcaagtgattcctagcagagaaacaaaaacaaattcatcctattcccagaaggactcacgtcaaaactggtaacaaaaatcaggcacaactccaagagaagacactggagaagaacaaagctgggtgtgtaagggttcacacacaatggcatgtctatttatgatcagtcatggtcatccatcgatcctatctgatgactgttaatcctgaatcatggccatttatcgatcttcctgatggtgatgactataattaacctctggagatttcatcttgcttaaattggggatctgatttgttttctatctgttttttgtgagaaaattggttggttctgtaataaaatatgtagagcagttccaggaggaaaagaaaaaaagaaagaaaacttttatttcttggaaagttaacccattaaactctcagggagactgattttagcattgtgctagggttgtataaatactgtcctttggtggacattgattgaagggtatacacagaaaacccttttctctgttttggcaatttctgtgaaccttaaataattttgacaaaaaatatttttaaatatgtctaaataaaataacttcatgtgacattaatttcccataaattattcaaatgctagcatagttttaaaaattaaaatcagttgtcctgtttcctcttaaaggagaatgtgtcatatcttctgatagtctcttgaggaaatgtacacaacaatttattcacccttctgcctgtcctccaaagacatttgtagatttttttctttttgtataaagataatatacaagctgagtatgatgtcacatgcctctaatcttgtactaaggagttagaggcaggaggatcaggagttgtacactagcctcagctatatactaaattcaaggaaagcctgggattcatgagaccctgtctcaaaagaaagaaagaaagaaggaggaaagggaggaaggaaggtagaaagaaagaaaaagaaagaaagaaagaaagaaaaaagaaagaaatcctattataataaggtggtttgggttgttttgttgttgtttttctcatttatcatccaaggagaagaaccaggcttgaggaaacacacaatctaaaagcaacctgttcacagcaacattagttttcaggcctttaattccagcactcaggaagcagaggcaagtggatctctgtgtgtttcaaaccagcctggtctacagagcaagttccaggcaagtgagactcataaaaaaagaaacaaacaaaacagaaaagaaaggaaggaaggaaggaaggaaggaaggaaggaaggaaggaaggaaggaaggaaggaagggaaaaaccaagctgagagctacccagaggccccttacccatgcttcactcaggctttacaaacactgaaataatactatcactttctgagtctggaaacatcaggtaaaattcctttcttatatggataggggctggagttgattatcccccccaaccttttttttttttttttttttttttttttgcaagatgcatcaagactgtatgaagagaaacaagagtacaggaaagagaagccaggactgaagacaggaacatgaggagactgaacagtagaacaattttcccccatcaagcaaggtttgacagatccttacctagataagttcgatgaggtctttttgttattaacctcctctcagatgccctttctcccttccccacccttagcaagcacagataaactgtattacaattcctcctccacacttcattagaggcatgactgtcctctcttacaggatctatggcacacgaactgtagttacctgcttgtcttcctcctttggctgtgatttcattcctttagggtaggaaagatacattatattccccatcaatctgcaggggagaatgtgtgaagaaaacaaagtattgcagtatagatagaactcaaggggccaatctcttctccaccaaaacttctatctgtggttttgaattttcctgatgctttattttccactgaactgcttgggctcatgctgtaggttatatggtagaatgttatgcatgaagccctctattcaattcccagcaccttggaaactgggcaaggtgatacatactttcaatcccaacagacaagagcaggaagcaggataatcagatgttcaagatgttgactacatagggagttggaggtcagcctgagatacatgacaatgtcttaccaaaaaaagtgaactctgttattatcaatataaaattcaaactgtgcactaaactaattgaatatttagttcaaaattacaaacacaacaataacctcaggaggatttgaaaaactatattccctgagcagacttacctaccacctcacacatagtaacttggcaaacatccaagctttttaaaatcatgaactcttcttgttggtagtagtggttataagcaacagagggtctacttatgtagctatagctggcctagaattgtgttgcaggatgacctcaaactcacagcaaacttcatgcctcagtttccctagacttaggacattattgggtgtttatttacccaggttgatttcacctttagctgcagaggaatgaacttgttttctttggaatcagtgatttcccaagctgagcaaacctcccatccatgggatgctctttatctgccactttaaagacaaaagctgcctctgtgatgttcacctacatagaacagatgtttcagttggctttacataaacaagcaattctcccaaatcaagactttctcccaccagtgcacttaattaatacagcagctaattaacaactgtttattgaagagcaggccctatgccaaggattgaagatataacagcgaagaaacagatgagacccctgccttcaagaaactcgagtaattcagggagtatgatcacattgattgatgatgaacatccaagcatagttaagtgatagccgaggtaatagaaaaaggatttcctgtctggagaaaaatcagttaggtctttgctttattgaatgactggcttggagccagagaaagttctagttgtaagggttattgttggaaagactttgtcgtaattaggtaaaccaagtgctactaactgatctccagagctatggaaccagagacactgaaatgttgtgggcagctgcgggatttcacctgtagcctacaaaggaattgtagtatttggcatgaaagtgatttctccattcccccattaatctctaaggggaaatatatgttaatatatttaatgaaaccaaaacaactagttgaaaagaaagtagggcacatttatatttctatgacaacccgacaggagaaactcattagtggtcataaccatctgaagtaggtacgaaacatgtgtacgcatttaccatgcagctcacacctattgtgaagccactacttgcttgctacaacttttacttattcaagccccacctgtactgttaattacacgtttcctttaagtcaattcacatttttactgaagtttgatgtcactgtgaatgggtaagaaacaaagtcattctcctaatatcacaaagaccaaacaatacttacattcagctagccattgttgcctggtgaagactgtgaaaaatgtatctttcttttttaaaaattacgaattatcacagagtgagattctgtacatactttctctctcttacaaacacacacacacacacacacacacacacacagagagagagagagagagagagagagagagagagagagagagtcagctgtgagatgggtaaagggagttagagagtctagggccagaaggaagcatgttctttgaaaccattagagagacttagaagggacatttcccccacagcgattcccccagtgattccatgtggtttctacatccacacgtaagctaacataaggaagaagtcacactttaggacataacagactcatgaccttgagaatatcttctgctcttaagtgtccccattctctgggggcatactctatatatttggggaagtaagaaacatgatttgaagtacactgctaagttatttagttcaaggcagccaatacttctcatttcctaaaccctaggccagatcctccatccctcctttgtaacagatacttgccagtctcccctcctgtggcccagaaactttctcgctcttttattgaaaatagattcttctctcctacaatatatgagatcatacaatactgaccacagtttccctccctccattcctcccatccctcccaacctctcttctcccccaggtccacaccccccaccattttctcttcaggaaggaacaggtgtccaagagagatggcagccaaacaggacaaacccaggtaaaataaggcaaggaaaaaatcccttatatcaaggctggaaaaggcaacccaataagaagaagaaagtcctgagaccaggcaaaaaaagaaagaaagaaagaaagaaagaaagaaagaaagaaagagaaaaggagatacaactgttcctactattaggagtcccacaaatacaccaagctgtaacatgagcaagctttatttgttacagtataaacaaaatattaccataccaagctaacagccataacatatatgcaaaggacctggtacagacccatgcaggccctgtgcttgccatttcaatctctgtgaacccatgtgaactctgcttagttgagtaagtgagccatgtttccccagtgtcccatgtcctttctgactccaacaatctttcctccccctcttctgttggattgtcagatctctgagggaacagacctgatggagacatccaattaggactctctttccacatgatgtctgactctgggtctctgcacctgttcccatccactgctggtggaagcctctctgatgatgactggacaaggcacctatctgtgagtacagcaaaatatcattagaaagcaatggttcctagaaactctcttggacaatacacaaaactgtaacaaagaagaaacaaagaaagaaaagaaaagaaaatctgaaaaaagaaaagatgacagttgtttttctccaggagatcctgaacaaatgaaggaaaatcttagccctccagcccatagagcatctgacattaaggcatttggaaatagctagtataggggttggagagatgtctgccttcgaggttaagagtgtgtactgttcttgccaaggacctgagttccattctcagcactcacactgggcagctcacaaccacccataactccagccccaggggcaccttataccattggcctctgtgggcacctacggccctacagatacattcatatgtatggatgtatgcatgtatgtatatttaaaatatttaaaataaatcttaaaagaaagaaaatactcattgtagaggcaaatgttgaaccttgctggcatgctacacccttcaagcagttgtttggaatgcttataagtacagtatattatcacctcatgtatcaggctagttcctgccactatgacttgatgtcaattagatccacctccagtcctatgttaacacaagactcatgaagtgctatcacaggccaagacatttccaggactaaagaatttgtgaaaaggaagaaaaaaaaaaccactgaagaggcactgagttcttgatgaagctggggaggaaaactttcaggcatctttactgtgttaggaggctctctgcttttgtggtaggcttgctcaatttttctcagtagtactctttttagctttgttctgacaaggaattagtcataatttaatataagtaaaaaataatgatccttttaatccatcttaattgtttatgaaagaccatttagttccggatgttcaaatgttattgtttgccttaatctgtgattaaaactatgcatagaatttctatgatttcagaaagagcactccctcttgtggaaacagctgtttctgcaactagttctcaggcattggaattcctagatgatcacacattttataggcaagtgactaaaacccagaagggacacatgaacttaactgtgtacctggctagttcctgagtcagacccagtattccggtctgctgtctccaactgagatcttctcttccacaaaatttgaagaatggtctcactactatgatttttctctcgaacacccactttctgctgccattccttgagcaacttcctccatgtgaaatcatcttggtgtgttttctctatggtatttaactgtttcccggagaggacttccttttatcctgcagggattctaagggaagacagggagtctctccatcttttttggaaacagttgctatgtttcattcatgggattctgtctgctgtctaattctcttccattctgctgattgtgacaataagtaggcccttatgcagagcacaagcaagttccagagcacaagcaggatctgaagcacacattacagcctggctggcctcccagaaaggaaaaacactgtaacctctacaagcatgttataatgctctcaagcctgctattcaaaatgtgctttgagaccagcaccacctgcaagacccctaaagtacagtgacatcttgagaaaagacctctggggtccaagggtgatagagtgcttgcacaggaccctggtgctacccacccaccctgaataaaaacacacactctgatttaagaagtctatgttgaggcatttctcacaagctttcagcttatgttgatactgctggtacatgaatttctcaaacactagcaagagtatatggcaaactaagtgtcctatgcaaaagcccaagtattgtgactcatgcctgaaatcacagtgcttatgattgggaggcagaggcagaaggatcaggagttcaaggtcatcttcagctatgtagtaaaatggaggtgtttaaaaatgttacctacccaaattgtaatgtacaagccccaactgctggttgcatgaccaggtacaacttgcaagttattcatccattagggtctgagagatggtttgtaggttaagagatcctgttgctcttccagagtatctgggttctgttcctagcacccatattaggtagctcacaactgcatgaaactccaagggatttggcactctcttcttgtctctgggcactggcatgcatgtggcaatcatgcacatacacacacaaacataataaaataagtatttcctccccaaaacaagttttttttgtcaaatcaaagccaatgaaaagttcctagatttcataaactcaaaagaaagccaccaccaacattccaacacagtcatctctatgtggactttagtcagaaattgaatagggtgaaacacattaattcttggatcctgaaatatactcatcatgtgtcacatatcctacctctgtccctaacacataactaccaatatacaaataagatatttctttgcagattaaggtcaaagcccaacaagtttacacagccaggccccactattttctgcaataaatccgtagcttgctaggtataccaaagaccttccaatagtggcctccatcaatctatacctgaattaccataagtcaaaaaaaattcaggaggagacatagtttactagaacaaacaggaacaaataaaaaatggttaccctacaggataaccattgtggaaaagaaagctgaacattgcaaataagaatcaaacaccaattacaatgattctgctgccatctcaataaaagcaatgcttatatgttttaactaacttgtgtgtgtaaagatgcatgttattcttaaaatgtttagatgttaactaattgtgagccattgcctaagttttagttatctgtgatgactgaaagcagatgagttgcctttggaaacaatcacttcttaatattacgtattaattctttggtaatttcacattatctattttgatcattattaacccccacttcctccctaaccccagcatttctgtcctcttcctcttttccctcttcttcctcttctccttcctccttctcctcctcctcttcctcctcctcctcctcttcctcctcctcctccttctcttcttcctcctccttctagagattatatcacagccgatgtcctggtcctctgactcttagaatctttctgcctcctcttctttaatgtttcctgggcctaagtataggggttgtgctgtaaatgtactcactaggggaagacacctcacagtctattgatctctgcattttgacctgctatggctttctggaatgatctccgtttactgcgaaaaggaagcttctttgatcaggagtgaactattaatacccatgggtgtaaggatacatgtttaaaatgaagttagagattacactgtcttgggaaagtggcagtagtgggttctcctaggtgccatggcctcactagccatgggtaattgctgggtttactactatatgaggcatgaattccttcatattgatcagaccttatatccaattaggtagttgctgcttatacccagactataagtgtcactattgcacctttcagaatattccagtcattgttggaatttgtagccgttaaagatgtattgaaccattgatttcttttctcccttggtagctttcatacgtctttaaggtactatgagatctagtcctcaagaaagaggattccaggtcagatctagagtacttccctcaagacctttgcctgaagtgtgcagtttcttcagcaatagggtcttaccttctttgctggaaggcaccaaaaagtaatagcctatattattttggtggtctcttgggctcccctgacaagcaaattcaaaggagattttcccaaacctggtactatagtttttgttagataagtctatagttttggagtgaagctctgtcaccctaagcagtgtaactgcaatgaaattctctctctctctctctctctctctctctctctctctctctctctctctctctctcctctccctccctctccctccctctctctccctctcctcctctccctctcctctccctctccctctctctctctctctgtctctctctctctctctctctctctctctctctctctctctctctgtgtgtgtgtgtgtgtgtgtgtgtgtggtcccagaatcccagcaaagcctctgggattgtgttacagcaagtgccctgggaaatggcctttgaaatagagtagcatgagaagcttcatccactgagcaagctggaaagaactggaaaggactgaacacagggagaggtgacaggtgatgcagttttaacagaggttcagctgatcccatggaaagttctgaaacagaaatggccattcagaaatgccccaagtagagggaaggggctaaacatttttttacctctgtgatcatgggatatgagctatcccttgagcagcagaggaacctcgaagaggcagctaccttggctgaggcaattcctaagaaaaactgcagtgtgaatggtacctacagcatccaaacaggttgggaaggaagccaaaggaataagtgccttgggcttctcattgaaggggtgaaaggggtgtatctgggttgcacgccacagcatccactgtagggatgcattgcaaaatgtccttgctgcttcttcaaccctgatgatctctttctgtggatgaagctgctgtcttacaacatctgcagaatcatctggagtgaatttaaaaatgcttctatccagttcttactcactgactgaattgattgcaagtacaatcaaggttcagccatctcggcctacttagttatttttaatctgaatggcaataatgtctcttaacatatgaagtgccttgggataatatttggttggcatgggacaaagctacagtgaacagtggtttcagtaacccctgatccaaggggattaattagagatggctaaggtgtgtgaggaagggaaggagccaagtataaacatatgctttctaccccctttcatggccatctcctcagactctgtttccccacataactgccatctcctgggaccttgatgatgagttttattggctaagttctaagccagtgaagcttatagtttgtttctttttttcttcttatctttggttcaaggtctgccttgggtcccagtacaaaagatgcttttattcacatagctcttatgatcctaaaagtgttggttgaagtatagagtagtgagtacaaaataaacagtgagatgcattcaaactaccccacaaaagcatgccattggctataaaaattaagattacatcaacgtacgctcactctcctctaggatactgttaccataggatgtatgtgtgtttaccaggtattctgagaaatttcaaatatacagaaattgaaattattagccctcacttcttaatcgacataatggtacactttaactgcaccccatctgttgcatagcttcaacaattgccaatatgtggccaactctttccactaatagtcacactttatctgccccacccctccagtctgccttcttttgaacaactcccatatgcatcctttaatccataaatacttcagatgaggcttcctttttagtgccttcagtattactaatttatcagcacatctgcaaagtggtgtggacatcatgccacaaatggaagactgcaggattattcggtctgtgggtaatttttggcacctaacatatactttcttgttgcttaaggaagacaataaaattacgtatgttgtttatctttagaagtttttaactttccctgtgtgtgtatgtatgtgtgcatgtgcacacacacatacttggtagatgaacaaaggcaagaaacaaaagaatattgttggctacagtacatctttgtgtctttgtggaggaagagaggcctaagctttgaaaaagccacttttgatatttttattgtaggtatgcatatttgacatacatgtggatataagctcatgagtgtcaacctgtactgctcatataaaagatgtgcactgtcacatccagcatatgtgtgtgtgtgtgggggggggggttcctggatctaaagtaagtcatcaggcttgtgtggcaagtgttttgaattgtgcacccatctcactggctcctgggaaatgtttttttttctaacacatgcatcttgagctggactttgtaccaaattccgcaggaattgacaaatgttccaggtagtagccagcactatgaaactcctatcttacattgcatattaatgtccagatgcttgtctatagaaattatctagtcagctttcctaagggagacatttagcatcacactgatgtgtggctacagttaggatttccaaaatgaatcagatcacaaaggggcagctggtctactcatctggaatccctttggtagcctacaccagcacttgtgccttgaatccatagttcatctagggaaattgtcagtagataatgaacgggaggggacaaatgtacctataagtaattagaaggcatggcttcagaaggtggctcaatactactgtccccacattactgtgagtagttgtggcagaacatgaaaaagacagaaattgacagtacactaacaaaacagattaaattacagagttttcttttttttaacgagtggtccaattaagacactttaaaaggacttacaagggaaaagtgaaatagcattccccacacaggactgcgctcaggggtattgtggctatttaatacttcatagtatattaataaaaataaaggtttattaattttgcagcaaagctactataagatataacatgctaaaacactttttataagcccatttcttttatcctcacaataaatttgtgaagtctagtctagatttattctccctttagagataaagatgcagagagaaaacatttaaggaatttagcaaaggtcacacggaaaccaccaagtggagctgcaagtttaaacccagtagtgttatttcacattagagcccacatgttgtgcattcttcaccagtataatacctgggcaccaacatgatttcatgcaaagtcagagtgtctcagcagcacaacaagggcatctggttgtggtggctctgccctgtaatcccagccctcggaggtgggtgcaggaaatttaagtcatctttagctatagagcaatcttgaggtcaagtagagtatatgagatcctgtcttagaaaagggaaaagaaagtaatatgaggaacacttagaaaatctcttgagttatttttggactttgtgaggctctctctgtgtgaagtcctttaaccctcatctcttaggagcagagctcaacttcactacaggtgtccaagccattatccatcatattctccacaaattatagggagtaataattttatatgtgtgtgtgcttatattacagctatacaatctttgtggctgagaaataaatggggagctaaaaataacacatttcaagtaggtaagcaaaattaacaaaaaatattaaaatatggtaaaacatgcatctgttttatgtgtacatgaatatgtgtgcaaatgtgtgtatatatgtatatatatgcatacatatacagatatctgtatacttaaatatgtaattggctgataagagagaaaaaatagagtggatacggcaaaagtaatgattggggttggaagtgttccggaggttataaaatatactctattgccttatataataaaatacatactgatttaagagggaaaacactttattttatgtacatccatctctacctttaaagcaattaaaatttgaaataaaggatgtgtcatatgcttcagaaaatcatgaattttctataaactgtgctgtgttcctatgtcattgctattccatcttatttttgtcttggaagatagggagaaaattctatatttaaattctgtgataagaatttctagtcttgcctgtgttttgaccatctacaaatgcttttaacagtgaacgataggccctcacacccatggcatgtcttcaagtcccagaaggtcttttctccattgagatttagcagcgatatttgaacaaaattgctatttagtccctatttgttggaggataacattaagataaaagaagattgaagactgcaaaacagtctatgctgaattatgagccacagtgcagactcacacagatttcttcaattttgcatagactcatacttccttcatgcatactagagcctccaaactgtcttctctttaaataatgcagtgaagaaattaaagttgcaggcaagcagtattaaagactttcagcaagaaaagaggtgagagagagaaaggaaagaaatgaatctttctagagaaaatgatgtgaaccctttaagtgcatctcactttgaggcgaacccctcaggaattagagctggaggttttggggaaatggcctccaatcttggaaggaaatttgggatctttgctgctggttatttagttttaataaggctcttggggttagtgattatattgtagtgtttcaatttaaacagctttttttttttttttttggagacaggatctcattatatagttcagtgccatcttgaactcacagtgcttctcctgcctcaacttctcgagtgctggaattgtaagcatgtgtcatcacatttggctcaagtaaattttaatcacttactttgcttccttactgactttgagacaaggttttactttgtagtccagaccagactggaactgtgtaacccaggctggccttaagcatattgagaggctctcctgcctcaccctctgcagtgctgggattacacgtgtgagccaccacactcaagttactttataaacccattgttctagatgcttggattgaatgaaacttgttcctggtctctggttattataggagcccccacctgtattacagagactctattggaaaactgggcacaagacaaaagtccttatgagagggtttcctggcatcctcatttccttcccagatttagcctgctgaatataaagactaggagataatagattttagatgtcttagggagcaaagcattccttagcttcccttccactttgccctaatctaattaagagccagacctcacactttgctcagagttgactgttaaagcttaaggggagtcatgacatcttacagaatctgatcggctgaagacagattactgttcagcctagataatattgattaaaagtaaaacaaaacaaaataaaacaaaacttccaaaatctccagagccctagtgaaggtcaccaaaaagtgtgccaaatatttgaatcatgcaatgatgtcactcaaacccaatcccgagaatctggcctttaaaatgtatttcaagttctgttctctgcataaattcttcagctgctccagcagtatcttctttgatgacctttttgggtgacttctcgattgaagttagcacttggccctgacaatttgagagcctggttctataccaatttaagcattaaatgttaatggcttaaaccttttgaaaatgtgaattcatataatagtcgttgagctagcattggatgactgactgactggtagatgggtagctggatggatggatgagtgggtagacagatggatgactaaatagacaatggaagcaactagatgattattaagcatggtagatttgggaaattctgtagctagagtggggatgattcaattcaccacatttattggaccacttgttaaagttgtgaattaattctgaggaaaatgtctaacacatgtgcagcctgtattcctgatactctctgcagtatttttaccacagtgaaaaattataaacaatttaaatgcctaatagaaaaacgtagtaaattattatacatcaacccaaccgagtatggtcattaaaatgataattacaaagactgtagagacatatttataccatatattatgtgaaaacacagaagatataaagtatatgtgtgctgagtttacaaggttataaagatatgctttgttcagcctgcttctagaaagtaatatctaaacatgaaaagagcagtgttttagcggggcaatgccatatttctcttcttttttaggttattataaatatttttctattatttaattctgataaaaatgagggtgacgaaggtcagagtgtggaaatattttagactaattggaggtgaaaatttaaattttctataaagataaggagatgtcattaaacatgtcccatcacaagcatttactctattattattattattattattattattattattattattattattggtgggactcctatattctaagctggcctcaaactgtgcaacataggatgaccttaaacttctgattctcctgcttccacttcatgagtgttgggattactggcatcactctgagtctttttccatcgttatcaaggttctgctaatagctaattatatcaggcatgtgcaagtatatttgtgatgtagaggagttagagttttaaaaatgccacaatgggaaaactgctctgataagaggagccacttacagaataaacatgtccttgaaatcttacaaaggcccttttttttataagagcaaccatcataatgaattccagcagacttcagttgttactcttatacgtggggtttcatcatgaggaatatttcacaatacaactcatcagcccatctgtaggatctgagtaattagcaactcaattccactctcagccttgacactctgggcagtgttgacttggatacccacctgggaggagagctgagaatttactggactctgaggtggagagagatgagaggaggaggtgagaagaaactgccttctagtgacagacatggggaggctagggggggaactctccagacccttcttctcaattgacaatagaactttcccacagaatgaatggtgagcgcagagatgggacagaagtgcctttggggagcttgtcttggtagattgttggcaaatttggggtttgggaattactgcacatactagattcagaaagcatgagttccaatccaaccaccatcactcactcgctgtgtgtagctgggcaaacaattccactagccactctccattgctatagagaaagtggtagctatgagagcattaacataatgaccatatctgttaatttgatatgccactgtgaggagcagatatgatagcaactggaaaggactttgaaaagtttatgtgaaagctgttattgtggtctgtgagtattaaccatcagagtcactcagggccatcctttatccaaagtgatttacttttacccttaacatgcagggcagtcaacttccccttttctttgatctaaatgtttttgggggaattttgctttgaatttgtatgtaggaaagagcctgttcctatgcaaacactacttggcagagagtttatcattaaacacacagagaacgaataacaggaaaaactgcccagaaagcccagtggaggtaaagggcctacaagataatagaatattgattagataatttgcctcagtgtcattaattttcacatataacccaaactgcttctgatagttacatctctcaaatcatgaggatcaatctgctgaacccaaagctcccccagaacagacaggcagaaaaattgttttctcaagtgtgcagggtattaattgcaacatcagttccatacagatccagttcttttctgcagccaacactgtggccttgattattttacagacctttgggtggtccacctttttcactacaagcttaacttctgtcttcctgacatctattattctacttctttaagtcctgaagtctaaacttcaaccatcccttttttcttcctaatactgcttgccccagttttacagaatgtcagtgttttgcattgctgacattttccacaaaattcttttcatttttcatgttattgccaaaatgtcaacatgcaaatattccatgaacttgccaacttgtatctgtatggacacacacacaaaggaggacaaagacagaataagaagtggtaactggtaatggatatatttcctgtttccctgcagtggattcaatctttgctcacctctcactgtttagtatctttctggaacttaaaacaatgctctcacttttaaataaataaagaaacagtcctatgagagagagaattctcctcactggaagccaaactgtatgatcaggaaactcaatctcaactttactgacaggcaatactcagcatttacagaggcaatttacattataaccttatttaacatatctatgaaacaggataatgttcggatttgattaaattaaattaaagagactcacctttgtctttaatcattcttttgactcctggctcatgaattgctagggaagtaaaaaaaaaaaagtcactggacttaaagggtagcacttgccaggttatacagtgtctatttttgagtaatgataaggaacttataaataccaatgaagactatcatgtactttaagaaatctgaaatctgaactttctgctgaatgacttccaccggtttttaggaaaaacaattttattggtaagttattgtcaagtgtaagataacctttgaaaacagaactttgttgctattcttggtgtggaaagcagtggctgtacctcttagctgaactcttcatccaagaaacagctattgagagggttggctcttgaggacaattgctttattgtgaatctaagggctatggaaacaaagacatctacattttgtttgtgtggtactaaaagtctgagatgagggcatggggctttggagcatgaaaacaacaacaactctgggcagtgactgaactacaacctgaatacaacgaaggtgcaatcgaattatgtcacagacaatgatagtgctctagacacatgggtttgaaagtgatggaacatgaaagagtcacatgccatatgatgacatttcagcccaggatgcccctctatacaacagtgtgctcattggtttaaagggagttgaaaaatgactgtcaccagtatggtggtagccattacaagaccatagcacaatgccttcctcatgtcttggttgctgctggcataaggaagcagcacatactctaggtgtatgaaagtagagaacctgcaattatatgcactcataactttccaatttaataataactaggttacctgcttatgcaatactatactttttattgctattttagattattctttctacttatttcaagaaaacagtatgtcatgttatgccagaattagcttcttatatctctccttgaccttatgttgtggtttgaatgcaaattaacttccttggctcatgagtttgaaccccatctgatcattctgttttggaactgtgtgggatttttaggaggcagagttctcactggaggaagtgattcattaggggagggcttcgaggttttatagctgggcccattcttatccatgctctgcttcttgtttagctaagagggaaggaagtactggtttctagctgcacattcctacaacatggagccacctgccatgggtaccatcccttccaggatgcactgtgttctttcaaactgtgagccaaaacaaagctttttttcttaaagttgcttcttgtcaggtatttggtcaacagacaacaagaaaaggaataggaatgacatgccttgtcttttgattgtgctgagaggacacagcaagtgatcaacctgtagtatggacattcgtgtcaattccatcttcacaaatgccttaaagctgcaagtgtgggaatggatctatttatacttataaaatgcattttcctagtctatcgtgtttgagattgtcatgcaaaaaccacactgagtgtgtatcattttagaatgtctcatctggcaccaatggattagagatattcccttagaatgtgttttaatccccaaggcacatttaacttcatcttcccaacaagatcatgcggttgaagcacgttattaaagaccttattctctgggaggatccaaagaataaaacatacaattaaatatttgggaggacagaaccattagagaaagagtaaatttttatttccggaacttcagacttggggaagaaagactgctgtgagttccacaagagcctggctaaagaatgatgccatctaaaagagaggaagagaatggggcagagttgactcttgttggagggctcctgccattggcttgtggacctagtctttctgatgggtaaaattccaggatcgaaagcggttcctttcatttcccttttcctttccctgaccaccttcccatcaattacagaatcaagtagggtgggaagagagtaaccccacccatctcttctatcatgaagggacattgctgaggggcaagctagatagaaacaagaagctaggaaaagacatcgagttgtctcatttctttcctgtttgagagaaataactcatccacaaccttcacatttctgtttcaattggaaaactgtggaggttaacacattaaagatgacctcagaggcaccaaaatgtgttggtgtcacacaaaggaatgaaaacacagacttcctcttggattaatttggccaagagtgagcccaaatgaatctccctcttctctcccctgtcttctgtctgtatgtagcttgtggttactgagctgtttgtgtctgtttgtctcttttgctgtccccaacaaagagctttggtctgtatttattaaatagcacaggcacaaacacacacacacaacaaacaaacaaacaaacaaacaacccaaagcatgacacgagaaaggaatgaaagattttacagaaatgtttaacaaggttttacttggggagaaatcattttactgaccccaactgattcaaatagtaaacagcaacattatcatgttgtctcttatatttacagtatatatttgttgtataatatgcttccaatctgttggctgctttcagcaaatgattaccacaatacacacatacatacttatagtactctgggtagagaacatgggaagagtacatagcttaaattaaagctatgcattggctaaggttgtaaaaatgcattacatgggaagtccaaggcatagtaaggatggttacatagtccttttcaaggcccgctaaacttaaatagactgagtaccaagtagcatagcaagttaaaacataatgacctcaggaggtattattaactttgttacaggatctgcctaaagttcagtgcttttttggtgtgtatgcgtgtggatgtgtgtgtggggagtgtctatacatattgtcataatattgtatctctatggaaagcgttctgaagtccagtttgtcattgaaggctttaaatgcacggagaaggtagtcaacaatgcccatttacgtcaacctcaaacatattaaagaaataaccaaagtttcctaaggcatgtaggatgcactcctcttaagatcacagattatatgtttctgtagtaaatgtgactgacatgaagcttcaagttaacctttgtcttggggatactatgcatcatggatcatatttttaagtggtgttggttcaacacctgagatatctgagggggaagtaaaatttctgttttcctgactgaattcgttttactagcctgagtatgtaaattgggttaatgttaattcttggctcatagcatacttctgtctttggctcatgtagcattttctttgttttatttgtattattcttccttctaacttatttttctctgatcatattactgtttcccaaagtagctttctattgaactccatgattttatctattaactgaaattgaatgatacactatctaaggtctacttcaactttgatattctgtgaatgagactaggacttgaaatacatttggctcagtgcctggcatataacaaatgcctaataaatgtggcttatttgcataacttattactattaccattattaaatctgatgaatttttattgctatccctgaatttcacatattggaaagttgtttggggtcatgtgattcggtaactcttccactgaactgtgaaatatacagctacatttttccccttggtcagctccaaagtatccattatgaatttatcattgacttacagagtttaagcctagatgaaattttaaaggttaattttcatcatggaaaaaatgaagtatcttataatgcaaacatcccagaataattccagtttgcaatgtcaagatatgcccttatggagttcttgtttcttcttcactttgacgctgctgcttaaatttcataaaagtttattttagagctgtaaggggccttggcagggaggccaaacactagtggggcctcattgtcaagtcatattttataggtattataagccagggtaaaaatgtaaaactgcctgacttcacaccatatggcagttatagagggagcatctacggtcaaacctggaggtcctgttctttgcatacaaaaaaggaagttttcatcccagctcagacttggacttcttgtctaatgccagtgatatgaaggttttgtactagccaccattatgccatcagcaacccttctctttggcttctgaatatttgtgataaggctgactgtcataacaagcatgcctaaagtcctttgctttagctcttagtcattagctgaaatctgcagtcttggccaaggcagattgcattaaaagatgctaaagagctaatgaagtgaacatttatttgtcatgtctctctctctctctctctctctctctctctctctctctctctgtgtgtgtgtgtgtgtgtgtgtgtgtgtgtgtgtgtgtgtgtgtgtgtgtgtgtgattcttgtgaaggtcagaggataatttgctgggagttgaactcaggcttggtggtaaatgccatatcaccaattgggttttctcctttaaatacctatatcatagaggaaaaatatgccctttttagaaactaaaccttggtccaagaattggctaagtatttcccccaattcctatctttgttgtgtttgggtatgccaagcaggacacacatgcagaatgcaagagtgttagtgaaaagagaaaggtaaatacaccaaaggtaaattattaatgagcaattttgtcatcctggggaaacagtgtttagcccccagagattcaggcattcctcttcatttcattcacaagttcaagctcagaggcaacatggctttcaagagaagtggttttttgttttgttttgctttgttgttgttttgttttcctttgtgctgttgactgaattccaaaatcctagagagaaaacttgactctcaaagtactttgggctgtggccaccctcctgcagatcaaagtcagacaagctctttttgcccaagagagagcaaatccatccaattctgcccccctgtagatgcgctgagatttaaatcttcagtgaaccagtctttttctgtctggagctcagcgacttttagtagaatagatgcagatggtcctggtggtagttaacaaatcaatctccctcctttccaccctccctgcctccctttttctctccctccctccctcattccctgcctccctccttccctgcctgtccccttactctggactgcatggtatagggggtaagagctgtgtccaaaggggctggccagtagccagactacaccaacactctaaaattaagcatagtgcctatgtttctccctttaccaaaataatgggagtaacaaagagccatgtttactctggagaattctgagcctaaatttcaccaatatttttgtgtttccccctccccacaatgttcagcacaatgtgataggacccataccaggtcctcatacagatgtgttaaaccggccaaataaaccaatcagtagaatacatagccttttggtaaaggtatcatttttctcaactacctcttggcgtgtaacatacggatattgttattttcagtgtatttgaaaggttcaaaatatagcatatttatatgatatgcaaaatgttgtaaaatttaagctccaaggtgctagtagaattaagtttgtggggatgcttcagataataaaaccatcctttgagggtttaatctcagacacattcaactagtgtttagaaagataaggaatggaagaagaggggaaaaggagatgggaattcaggacaactgctccttttaagactaggtgaaccatcatttcataagggctaatttttctctttcaataagtcactcattggccccttacctacaaaaagacagtgtggttggtgaagtttgaagagggccagcagggtgccctgctgtgtctgaagtcattgtgcttcaaggcagacatgctactctattgactttcgctgtggtccgttttatattacgatccttcactgttcactcgtcatgcttggaaagttggaaaactccccttgatgaggaaaatgaagccctaggctgtgcaacccaaccaaggaatggccactcccttggaaccaacacttgcccattctcttgcattccagatattcatagaaactatcttttctcattccaagcctgggatttcactctcctgcgatgctgctgctgagtatcagaagggctgatctctaaagtcagcaggcgacagacttagctttggtttttgtaagagtgaatgtgacttaactgtccctgtggcagcttctgccgggagaagaatgtgcaaaataaacagttgctgaaaagcataattagccgagtgcaaatctcgagttatttgttcggcaattgagacaccagtgaccttaaaatgcttagttagtccaggatgtttagagccaggatgaaagaatctttgccatgtttccctctcattgtcgtgtaaatctttgactttccagagtagcggcaaattaattcagatacatcctggtggagagaaaaggatagaaaccaagaccccagcggtgctctcctctcagcggtttggggagactacctttagctgcccccccccccctccccgaccctggaggttaaagcggggagaaccgggaggcgctaggacctggatggcgcctggctgagcccggctcgtgagggcggtggagtggaggagggagatgtgggaaaggaggggtgctcggggggcgggggagtcatttatgcggagcgggcgccgctgctgtcgccactcacagtccccgcgcgctgctcagagtcggagggagcgcagcgagcgggtgagcaagcgagtagagggggcgcccggtcgttgtctgcgctcggaccggtcgtctccgccgcgctccgggaaccccgagaagagcgagaggcagccgaagagtgcaggagcggagcagggagagccctcggcggaggcaccagtcccactccaccgcctcctgtgccagcccgggagtgctcgcccaccgccccaccaacccagagcctgtagccccggtcccagctgtcccagggatggtctaagagcctgcaagaggctcgctgcttcgctcctcttcgctcagctctcgggctctctgcctcctaccgaccgctcccggttgcgcgccccgccggcccaggccggagaagttagttgtgcgccccgcttagcgcgcgagccagcaaccgggagagcgaaggcggcgaggcgccgggaccatgggctggggctggggtagtcgctgctgccgcccgggacggcgggacctgctgtgcgtgctggcgctgctcgccggctgcctgctcccagtgtgccggacgcgcgtctacaccaaccactgggcagtgaagatcgcaggcggcttcgcggaggccgaccgcatagccagcaagtacggattcatcaacgtaggacaggtaactaaacccccggtggctcaggcactgtacgtagaaactagctgttgggggcttcttgtcccctctgtttggacccctccgccttttccagatgtacttctgcagctgcggcccgaactctagggcgatgctctcgcccgcgcgttccttgcacagtcacacacatgccccgaagttgctgggatctctgtttaatttgtttttacaagcagtgcgggacaggtagggtctttggaaaatctggagtgcccctgcactggctcagactcgccttggacctttggacagtccgggagtgctactagctagaggaaacacccttgccagtaattgtgacagggaaggtagagaccattgggaggccaaggagtgagccgatggacccaactgggaggggaaagcctggattaacctcttgggccacagaactatagggctctggggagtctggaactggggtgggaggagagaggaagggggcgggacaccaggagggaagaacggatttagaggggtcctggctgctggctcgcctggctgggatccaaatgtgggcccccggagctgggtggggagggacccgagagaccttgaaagccactgaccaggttctgctcagggaacttgggaatcttctattagggtgaaacatggagtgccctgttgcagcgtgtggcaggaatgctttgatgagatgcctttggttggttttcattcgatttgccttgctgagggaaatgccaatacatttttatgggacccttggcaacgctaccgatttatattctggcctaaacgccctagattttgtcctctttcccatgtccctaccagaaacaaggctggagagaggtctgtaagtgcccctcctaaggaccttacaacttcatttaagattgatccaaggagggaatcctgctgtggctctgactggggttgagtgtaaaactgaggttcctacctgggccggaggagcgttttggagtgttcacatggtgcttcaaggacatgggacaggaagatgaccattggtagtgatgaagcaagagggcacagatggtttctgagaccatttcctttgaactccgtgcctaggatgtcaggggcagcccccacccagctctggccactgaggggaaagagttcctttgcctgtttctagaaataagctggggagcagctgtgagggttcagagggcaggagggggaggtcttgctctttaccctccagagggagagaggttgttttccagagaagccagttctgtggagggctgagatcagggaaagggacttggtttatgtccccacccgttgttctctcaatcccctaaagaagttagagcaaccggccagattttgttgcctgagtgcctgtcaccttcaggaaattgcctcttgggagttctcttgacctcttctgtgaaagaaacacgacatccattcaggtctttttaaccaaagcttacagttgagcattcaatagtgccgacgggaaggcaaaaagacataaagaacacatttctaatctttcaggcgacattttcagttcagccaacattaagcatcttctatgccaggggcatttaggtggctaagttctcaacaccatacttcattcttaatttcaaaaacaacattggtgcacaattgacatacaacagatggggcaggaggctgatgcccgcctgcacagccatgatggggacccaggactttgtccaggatggcccctttgtggatcttgccatttagagaacccttctacccagttcagagtaaatccccacatccctgaattctaattgggtagctcagtggactggaagcaaataccctgtcaccgctcactgatatgtagtttagaaggacctggacttgttgacactaggaggcttcttaacttgcaagggtacagagacacttctgtcctcctagacttagggtagagcttagattccagaatccaatagtctctagtgagaggggagcagggttatcttatctgcattgaacaagcaaacaagtcagtgtcctataacctctcctgactttttacaaatgtctttatagacaagagccacagctctccatgtcaaaagtaatgctaagaaagtttatgtatacataacacgaagtactatttactgtggtttttacaaccccattgtggaaatacagctctcccgggttacagaggaccgctgaattgatgcaatacctagtgcacaaagatatgctattgtacagtataaaacattctcgtgcgaatcaaaggagtacagggttttggctttggcgggataaattgagttcctgtgtgcaagatcatagcactgtaaaggcagaatgtattttgtattcatcctttactgcactgaccttttaacactttagacatccttttgttattctttctttccagcaataaaccagctgtggttcagcttagggcagtaaataatttgccaatgtctctggaatgttttcacgttctgtgggtccggggtgttatctcatgtgtcacaaattggaccaagaacttgtttattatttctgaagtcatttatgatcctggtagtacacacacacacacacacacacacacacacacacacacacacacacaaacacacacacactacggtgttctaggagagtaaagtagtgaatttttaccacagtcaagctacagtgttggttgtctacttagaatatcaatgcagtgttttatgtagcatgttaacatttaaaggtaagatttgtagcctggagatttctgcagagaagtgaagtgggggtctcttttctgttcagggaagataggatgttcagagtaatgggagatgcaaacaagcaaaaaggacctctagaagggagcagtaatgaggattgtcttgcctctggttatggagatagcattattcttcttaggttttaataaaatgctttcattttatgaatggcttatgtttagaattctgaagtgatgccttgccataatcattgctagtagttgttattacgtcagcatatatcaagttttgtttgctgtgttagctgtgggatgtctggatttggcaaaccgggctctgactaggagtccctggagtatctagaactaccagctcctattgggatgcctaagcgtaggaggtatgcatggctgttggcctgcttgggtaagaagaagaggcctttgttttctgttactaattgtatcccctgagtcttgaattaacagtctacttgttagggaattgaaatataaaggaataaggtcagatccatattgttaattgttggtagaatagatctatataggaggaattaatttctggttatttgaatccagggagaagatctcttgtgaacagatggtttgtgatgtgtagttgctgtatttatccttctgtgaattgtctatagtcattgattccaagccagagattaccaatagcagtcctcctcaccaccagccatgtcaccttttgagcaagtctctgaaagagtaaagccaaatggaagctatcctggggtttgcttgacacaaggcttccccagagaccatatgggtgtggagactgcagaggccactagcaaggctgtgcaagtcacttaacttaatgggtaccccgtgcctccatctgtaaaaagacaaaccatgagataacagagtggttaactatgtgctgctcaacacacaggcctgccataaaatgtttgttgaattcaaatcagaggagaaagattgaaataagtgagacctaaatgctatttagatatggtgaaaggagaacttttttttttggaagatacaaaatgtagatgtcaagaaagtgaatttttcatggctaagtcaggtgagttttgtacgcagggaggatgattttctatttcaactaaccacttaagacagtttcaaaacagttttatgttgagcttcaacaatgagagctgatttccctggatggtaccatcttccctcatttatctttactgtagcaccttaaatataggctaagcttgcttaagatgggaggaaggaaagacagtatgtaaagaatgaggactagggatgtagtttagttggtagtattgtacaaagagctgagttcagtccctagtgcaacttaaattgggcatggtggctcatggattgggagttcaaggtcatcctcagctatatagtgaatttgaggccaacttgggctacattagatgctctctgaaactgaaaatgtctgaagaacaattatattacgaagcattttaccttagagtattctgttgaatcatacttgaatttacatgttaaatctgaatgttatttgtacaagtaaacccagaataattttccaggtaagcaggaaaagctcttgagtgggaagaacttccttcaaatatgctgctgcctcatttcctgattagttttgacctgtggataacaggattttgaaatgctgatgaatgttgaggagtgagttctgggtgttcatggacagcatagaaaccggggatgcggctagcctgataggaattcccctcgtaaatctgtaggcattttgtaaaggaatgtttaatcccagtttcatgcctgtgtgatacatctggccttgcctagaatggctcttcacagccaagaacctcagccctgccttggctagctgctctgttatgcatatttctggtgatgagactgaaccagaacagggaaaccttgactagaaaaagccatcaaaggccatgacctgatagtgatggagtgtatgtgcggttctgttatgttaacctcatagacaaagaatggcttatatgaggccttcggggttctgtttaacttttgaaaaccgttttttgtgagccctaaagctgttgaatttgccttatcacaatctttcatgggcttctttccaggggttttaacattaaaggtcagccagagaagcaggatagtacgctgggaaaatgtccagagaaagggagtcctgacccagaaacaccccttgggatgggaggggcatttgtgttattcgttcaagttctgtgaagtaaagcctggattcttcccaaggctgaagtgtctccaggtattgttttgccttgcgaccacatcactaagctcagtcaggttggttcgatgacaagcttactttgcctatggacattcatgcttgctagaatatatatatatatatatatatatatatatatatatatatatatccatttttggttttataaaactaaacattgcatggttaagggtgaaattattacttgtgtagtgttctcattagtttccatgaagcacagctctgtatctgaggataccaaggagagcaattgatatcaataaacgtgttgattgaatgaatcctgggagaaaattgagagcagaaagaaaacaagtgtgtgtgtgtgtgtgtgtgtgtgtgtgtgtgtgtgtgtgtgtgtgtgtgtgtgggggtctttccttttgttaactgacctggccctctgctccttgttataaaatagtgcaccactgttcagcccatttaggggggttgctgctaaaatcaggagtactggtgatgaagatgaatatttggctaaacagtgcaccaatagcattttatgttccgtaaggaccctagagagcggcaagagctgctcaaaggaaagtgaatgaacattattgtaactggggtcttgtggagtgtagcagttgtgactttttccaaaattttgtggtttccctcggggtgtaaagagggaccaaaagcagaggagccagtgttgtacctcatttccctaagaggtgactgagggctacctaagcttttgcctaagagccatgaacacagtttgaacttgaggcaactgatcagtcaaccaaaccttccagtctcctggttgggcaggcctgatattcaccaattacctctagtgtagggactccagggctttttatttcagttttcaaagtaatagctttttaatttaaccctactgtgaatgcatatgaaagagtagtggaggagtgaaacttggaagcattggaggcctacaaagaattcagcgggaaccattttaggtagaggtgtgcagaactcaaccactgtcactcaagctggcaagcagatgaagacgcaaagggagcttactagttgagatggatctacatgcatgccttccttcacagttctgaaaacagcaggtgaatcttttttttctgaatttatgtggcctatacctttttcacagcaaagtctagtctgacctaagctagctccttagatacagcattggtttgttttattacagaaatattaatgagtttgagcctaggagtgttcacaatccagacagaggtgtatctaaggcagtcagcttcccaagcagttcttaggcatttgtgtaccttcttcgtgtgaagaattgcgaactctgaacatgtacagccaagttcttttattttcaagagtgattgtgggcttgactagtccagaagccagaggtgatggtaatgtctgtgatttcttcatttccccatgggagcttcattctcgggcaaatgctttctacaaagcatcaaaactcatgtgagtcttagtaattcttttgtccagcagtggcattaacatccctgaaggaatatagtgtgttctgatcattgaatgggatcatatcccctgcatttgggccagtcatttgtccaaggggacagtggttcatgggtgggtcatcttgggccacatgtctagctttgaagtgagtgaaatgttgacctctgctaggcagtccaacatttggggaggggcagttccctaaaggaaaatgaaattctgttactagcataagagaaaacagatgtgggacagagaatgaccccactactgatatgattatataaggccatgaatgtctaggctagttgagcattaccagggagaatttgttatactgaaatcctatgaagagtgaataatgcacagcatgctgctccagcaaacatgtaatgtaagtctccccagattgtgagatatttcctgggacgaggcatttttatttacaactatcatttggtggagcagtggagacctgcccagttagtatggctcagttattcctgggaactattcataatgaaccggaggaagcagagaataataaaggttattattaataatgaaactggaaagatttggaagttcctatggaagtatgagtggtaagttttggtgatttaagtggaagtgtagtttgagagagagggagaatgtcagggcagctgtaattatagcctcaggacctggagattgtggactcgtttgtacaatttgggcagtctgtgggagggagcatttttatggagagaaatgcagattaacctgcagttttaaagatttttgtttagtgtatgttttgaggtacacagcttcatgttttggcatatgagtaagtgtgtatctctctacatatgtagatgtatacacagataatggttactaaagaaaagcaagtaaatctgtcattttctttctttctttctttctttctttcttcttcttctttttttttttttttttttttttttttttttttttttggtttttcgagacagggtttccctgtggagcctatcctggaactagctcttgtagaccaggctggtctcgaactcacagagatccacctgcctctgcctcccgagtgctgggattaaaggcgtgcgccaccaacgcctagcaaatctgtcattttcacatctcttcggagctctttaatttgtttattaagattattttacttgaaaaatttttgtgtctgtgtgtgcctgtgtgggtgtgtttgcacgtgaatacaggtgccagcagaaggcagagccaccaagctcatctagacctgaagttacagatggttgacagttgcccaacatgggtgctgggaactgaacttgggttatgtgcaagagccatacagactattatccaatgagtcgtctcttcagcctatttattttctaacaagagtacctaaaatttggtctttaagctgccagctttcagtaaataatgctatattattcctgtagtgttcctgtggtgcctcacatccctaagtgtttcatcctatgaacactgctctttttgaacgcataccatttcctcttccttctcatccgtggtacctaccattcatttcactcggttttggaatagctggcttgtatccctccagactcgacatacaattgtggtcacgtgcgttaggttggagggcaggtgcagtgaaacctccaacgggtggggcagtatttagcccaggaaagaagtaaagatccctgcgggtagactttgcccctcatccacctccacgtgaactgtgcaagtttgtaggaagtgcactgtgaaaatgaattgccaagggatgacatatgcatgcctagagcagggggactgtgtctaaaaaacagaggaatgccctcatttagtcagcaaaggagcaaggctgtggatgaaggggaaagcagagcaggacggggcagtctaggaggatccaaaagagaggtgtgaccacccagatctgcagcagtgaggtgcgcgatcaggagagtccagcagggtgagaataatagtaacggggtctccagagttcttagtggggagttgggtttcgaggccatgcaaagcaagcacatagccgttacccgtacttctgcttctactgactttcctatattctgtccacctttttctcatcaacatactgtagttaggacataggtacaggagcaaaggccctaatgccattgcttctaagctggaggactctaggcaatcaccctaagctttctgtgcctaggtttcctcatgtgtaaaaaggagataataacgttattcttcctcacagtattgctgtgaggattaaaatagcacccaacacatgttatataattaatcaataataaatgtcagttcatcttctttgaaaagttgtttcaacctccattagctcatttgactccaccaatttcttttcatgggcactttcactctcaaacatgttcaagattagaaaagaaatgacgatgaccccgtgtgtacatgtgtgtacatatacagttagacctttatccttccactcgccagtgagttccttgagtacagtttagttcttcattttcatcacatttatgttgccagcagccagaacactccaaagcatagtagatatgttagactggaggcacaaagagcttaggtagagggatgcatgagagagagagagagagagagagagagagagagagagagagagagagggtggtgcttctgaattcacaggaatggcaggtgagtggcgaatcagaggtgttcatgttgggatggaaaggaagtgatctcattagccactgaacaggtgaagagcacctacagagcaggggactgcgtggaagtgatgtctggatgcttcagtgtttgaaatatttttaggaaattcataaaaaacatagcccaccatgaaatgaatttccaaatagaaacatggttttttttgctgggcgttggtggtgcacgcctttaatcccagctcttgggaggcagaggcaggtggatctctgtgagttcgaggccagcctggtctccaaaccgagtgccaggataggctccaaagctacaccaagaaaccctttcttgaaaaagaaaaaaacaaaaaacaaaaaacaaaaaaagaaagaaacatggtttttgctgcttgtaggtattgaccagacagactagtaaaagaaatgaggcattgattggctttgcatcattttgttcttcatatcagagaggtagaagggtgaaagggaaggcaaaaaagactctgtaggaactagggagcagtagttcctgaacacaggaatactgttctgaaatgacagaatagtgtgtagatggagaggtaactgatagggacaaaggaatagggtgggtgtagggctgtaaattcaaaaactaatggatggctagttcagtaagctaatgagttgagccattctagaggggttttgttgtttatttgaaacaggttctctatttatcctggctggagcttggagtaatcctcctgcttctgcctccccagtgatgagattataaacatgagccaccgtgccctacccctgagggtttttttaactgctccctctagcagttctgtttgattataaggtccaagatgtggtatgggtgggtgagagagagagagagagagagagagagagagagagagagagagagagagagagagagagagctggtaggttgaaaggagtcaataaattgaggctgagttgctggaaagggttatcagtgtgggtaagacaggggttgaagtgatttgtgttggtgcacccactgggctggtaaatgtgaagtttgcctcacatttcaattctccttggataactgtaggcattatctctgctttccactacgatgtgctattatttgcactgcaggtcctgtaccaacttaagggataaaggcagacacccaggtgattgctttcaactcccaatgtgttttttcttatttgagttaaaaactgaggattgtgttgagcattcaatatagaagaaacagtgtacacagagattgtaaaagcagaaataatacttaaagttgatttctttttttctttcagtgttatgacgcttcctggggagacatgaacaaatgtctcttcaccttaggtagggcacacatgacaaaccaaagaaactatttttatatcaatctgttttattgaatgagtgagtttacaagagttaattataggaatgtgagtgaggggttgtttacaggagtgtggatgactcaagggcagttgcatcaccaaaaagcccatcctagcatgggtgactactcaagaaaactgcatccctgaagctcctggtacaacatgcagacaagcccactaaatactcttgtctttgagtgctgactacttgggaaagggttttgtgaatcttgtaactcttaggaatttcctgagccttgtgggtttcattagtgtcatgaatcttatgagttgtgctcttctcttcagaaaggactaattcagtttggaggcaataactatataacgttttacagacaaggactcacagtggagtccaagattgcctgcttttctttgtggagtccaggctgacctcaaactcacagtgatcctcctgtgtctgcctcccaagtgttgggatgacaggttaggtgtatcctaccacacctgccttaaaggatgatttttaaatggtatgtactatatcatatataatttacttcagcataggtagtcatatcatccgctttctatctctgaattatgttaggtaattataatttattcaaatgtcacatagcctgacctgtatatacatatttcatgtagcacagagaagcagaatactcaacatgttgcttgctttatgtattcttgttctgagtttactgcctgtaagatatggattttaaatttatttatagagtattcaccactttttttcatgtcagatgggtaatatgctgacatcaaaacaaggtgtgagagaggaatatcacacaatgatgtgaacatctaatcatcactcttgagagtccaaaaagatctggaatacataacattctaggattactctattctataggttaatcttgtttgcatttgtatgttaatctgtatgttaatttagagttagaattacaaaggaagcattaagttcctagtgtaattttctgtgcattatctgagtggttaattctctattgggaaaattatactttggataccatgccagtattgaaactcggatttattaaaagcaagcctttccttgatggttttccagtgttccagtctctctctctctctctctctctctctctctctctctctctctctctcgtgtgtgtgtgtgtgtgtgtgtgtgtgtgtgtgtgtgtgtgtatgtgtgtgtgttagagatgagggtggtgacaaacaacagtttcaaagctctctaaggaaaaaatggtggggctgacttttttgtaataatattcatacataaaagaaatggtatttttctatactgagacactggtacagctgtgaaaatatagcattctctccatattgatgttcccaggcttgtctcttgttttctctaattgaagcttctcaaccaaaataaagcttggtcatgcacactagtgcaggggtggggagataatcccagagcaggcaaatatctataactgcaaaattagaatggtactgattgcttatgctggtgttactggaaggtttgggcaccatgcattactgaggaaattaaggtcccctctttgggtttagtctcgttaataaaaagaatttaaaaatggactcaggggaaacagtttttattagtgtttgggaaagaacagcaaggcaggcaagctgtaaaccgtggcagttgtagagtgtgttctgagagggattgggtttggaatctgtagaggaagaagggaggaagcattcctgccttttgagttaggctggcatgttcagcagtgggggtcagcaagccaccatgtggcagcaagcacctctgtagtggaagaggagcttcagaggaagtaagaaagcctggagggctagagaaagctttggtgctttggtgttggccggtatctgaaagaaagatgggaaagaagaaaaagttatgcttttgtgagtaaggactaagaaaattggatgaaattagcagagctacatggccattctcaaaggctttgtactttttggtgccttcttaatctaaactacccaaccaatttctatcttttatccctcatcactgggactagtctagctgcactaaactctctctctctctctctctctctctctctctctctctctctctctctctcgtgtgtgtgtgtgtgtgtgtgtgtgtgtgtgtgtgtgtgtgcgcgcgagctcgagcttgagttggacatgggagtggcaacaaccgtcaatttcaatgctttctaagaaaaagttgtagattacttaggatttgctacaggaaccttgaatgctatgccaaacaagacaatcatgaattctgtttctgcaaaattcacatttacaaaatccgttgaagcagaagggaaaagttgataagcaatggtaatcaaaatgccttctaattgattgccgtgtcctctttctgttttctgagagagggtgacatattccagactgcccccaaacactatgtagcacaaggatgatcctgaactccaatcctcctgactctacctcccactgctgggatttgcagtcatttgacacaatgtacagcggcatttcctttttcaatatttctgaataaagccactggatagtatatgtcttagttagggtatctattgctgtggtcaaaagcaatgtggggaggaaagagtttaatacagctctcaggtcacattctactaccgagggaagtcagaggaggaacctggaggcaagaactgaggaactctgcttactggcctgcttctgatggtttgattaccccactttcttgtacagctcgggatcactgctgagtggccacactggccatagtcagcagggcacttctgcatcaatcattaaccaagaaaatgccctacaggcttgccctacagggcaatctgatgaaggcgtttttctcagttaggattccttcttcccaggtgtgtctaagttgacaaacaacaataaacaaacaactacaaacccaacaaggacagtatacttgcatgaatgaattctgtgataggtagcatatatctataaggttgtgaggacaattaatcagtacctatttgtcaggcattctggtaggtacaaccctgttacctttgcttgttcaggttaagtttatatttgattgggaggtggcaaactataaaccatagtgacataagtaaaataacctggaagtgctgttagaaagcaaaaatgcattagtagatttaaaaagtgaccatctttgggacagctggagggagaggttcatggaggggaaaatgaagaattaaggaccagatgtttaccttatcaatgggacatatagcatcaatatctccctttggtggggagcagagtaaaggagttgttgtattttcaacaaatagttgggtacaaatgactttttcctcagctccgtgagtaactgggactaagggtgtgtgttcaccacaatgcctggttttatgaattgcatgttttttgttataaagtaattactatcctttcaaaaaatgtacagaatgttaggagggagctatccacaaggctgcctgcagtgaggtggggtccatgcagaggagctcgaacatggaaaaccccagggaggaggccagctggtgtaagtggaccaaggctaaagacgaatctgtgctggatcttgaaatggctgttaattcttcttcgccctgatattaccagtggctggggtatctggtctgtcaggacaagtgtgttgggcttttaatgatttcctccacttgtcttgaaatatgtgtgccatttgcccttcctactctgccttgtacggaagaccagactgatcattgctccctggatgaacgccgcactctcctgcttctgtacctgtctttatgctcagaatgctcccctgaccattgctcctggaaattctgtgtcatctcaaaatgacttctttatctcccctagaagtatagctgaaaataatatgtaggcaaaattactgtgagcttttcaactactatgcttctcttcggggatttagaagagttacttatttatttatttatttatttatttatttatttattttggttcttttgagacagggcttctctgtattgttttggaggctgtcctggaactcactctacatgtagactaggctggcctcgaactcacagagatctgcctctgcctcccaagtgctgggattaaaggtgtgcaccaccaacaactggcaaacagttgagttttaattccttggtttccctctcatgggtgacccagttatgactctactttatagcatgctgcatggtatctcactccatagaaacagtcattatattgggtgaatgctaaagcatttacaggcatgggctatttgtgtgaagtaaatctgaacaccagaaaaaatttataaaaatatctgtaacccagcccatgaagaaagctggtcagggcataaaatgtttgataaagggtggagtaaaaagcagtgatatgagactttaaaacctaggctccctgggaaatagcccaacacttatctcttactgttttctaccttggcattgtcctcagggtcattctttctgattttgactcttgggagcattatttgtgcgacaaagtacttagtatgaaagtatccaagtcctgagagccaaatcccatttcatcctggaacaggcttgcttctccatgtacctcagtgagccctaagagcctgctagctgtgatacttgtcctgaaaatggcagtggaagccttgtgtctgctgggacagtgcaaaccagcacagggccttcccaggaaagaacggggcagtagtaagaaaacagtttgaggtcacaggcagaccactgtttgtgcagaaacagtggaatggcaaaaataagcagatccagcatattctaaggtccctgaagctcactgaaagataagcagtgagatcgtatgatggccatagacacagggcagggccagccagggttggtcattttgaaggaccaaaaatctgaagttccgtctgcatgagagggaggattggattccagagcaaacagacataaattagccctgcagcttagaccataaggagcggcttctgaaatatcctgggagataggaaacaaactcaggacaaatagaacaaacattcattgggagttaactccctttagttacagaaagaacattctcttggttgagtgacatggccagatgccagtctctcaactgagatgggtctccccatttgacctatccggggcgtcagatccaaggccttgaatgactagcccttcggtctcaggcagatagaaggagaggcgagtgactttcctggttccatgaaagagagataggaatgagttttctcatgggatgtgtgatgtaagactagagcgatttcttcctctgatgtgatggatctcagtgcaaagactctttcactctttgttcagacttttgtaaaccttaccctgacccactgtctcctcctttcccagtcagagttgatgccttcctcctctactgtccattcaatgttcagaatgccattcactgtatttttccttctttgcacatggaccgccacatccattttcagtgtctcaacactgtcaggctcagattctacctgtttgcaagggccacttccatggataaaattatctcaggctaaaacctccacctccttcatttaaacttttatcaaagtttgcatgcttttatcatgcatgcatttctttctttctattggtcatttttctccttccttccgtgtgtgcgcgcgcatgcgcacacacgtgtgagtgcatgtgtgtgtgtttgtgcacagtggtactgagtaatgaatccaaggccttgtccatctaggagaacatactatcactgagctataccagccttttttgtatttttttaaatttttgagacagggtttcactaagcagctcaggctggccttgaactcactttgtagccatggaagatcttgaacttgtgatccttttgcctcatcctcctgaggtctggtctggccagtgatttctttgtagccagggtttctgtctggtccatcttcaaatgccctatgacacctagagaggcactcagaagttaaaatggcctcagaagtgtattctgaaatggtgagatgataactcagagagtcataaagaccaccaaagctttgctgcccatggtgtgagaatttattgatttctagagttacatgtgcacaggtgacttcagttggcaaatgaaatgtgaacagaagtgacacctgtcccttcattaacagtcagtgggtgactcctggtgatggttatctgcctgggtgtctggcaaacctccaggcagtggatgcttcattagtctgggttcttgacggggtgggggggggtctcacgaggagaaagtgcacagtgggcataagctagagataaacttcgtggtttcaattgcttcatttcttgagtcatttgttgttgcagtggaacctggttcatcctgatgaatacaaattccaatcttgatagttttcttcttagtcttgtacacaatgtaagctgtgtcatggaaggacaaaaaaggattggtataagaaccctgcaattttagagcaagtcctaagtgatctacattaataactacgtgcttcccaaacaacaacaacaacaaaaaaccaggaaacagatgagtaggtctttgcacatatgaggtcacgtggttcccttgtttagaggagatttggacttcctgaaaggagcctgggagaccctggggcttagttgttctaaattgcttttccaccattttactacactgagatttggagtgtgagttcagatgtagctgtcagtgactggcaaacctgttcagctgttcagtagttcagggctttcctttcccttttgggaaggcaaacatttaatgcgttgcaggttatcttttcttttcccctatcaaataaaaattttattaatttaaaaaacgttgtccttgtagtgtcatctacttggaaggctgaggccagagggtcattagagcctgggaattcaaggccactctgaaacataatgacacttgggctcaaaagaaagattatggaatagagggcaggacagtcttgcttgcttacttcccagaggccttactgcatggagacttgtgacacccactgctgcagaatccacttcaggttgtggttcctttgcagggggtactatgctctcttgcttggagaactggcttcactgcatgtgggatcttgcattccctgatttatgtgatgtagacacagtagggaacatctgagatgtaaaatgctgtggtcggagtctccaactgttgaatggagtccaaagcagcagatttttcttctttggcaagacagagctgaagcgatgtgcagggatttggtttgccgactcccaatctgctgaaaactgcagtaacttaaagtggggtgggggagaacataagtgcttcagaatttggaaaacactccagaggtcacgtggcttgtagtcttaggcaatctaaatactgctcagcttaacttttttgttttgtttttaagtaagttgacatactgcatgtggatatgtgtatccccatactctttcatgaaaataggcaaaattttattttgttcaagcaaaaattgaaaaaaagtaaaggcagcattgaaccctgaaaggtttctttggtcactctagcccctagagtgtggaggtcatctcttgccagcatacgttgatttcactgtgaggttttccctttgctatcattctgtcttacattccttgaaaatgttttagaatatccacactgtgcttcaggccatcccaagcagagtacacaagcactgtgcttgggaacttttatactcaaaggtggcagtttttcttcttgcttcagaataaatgaattggtcacagctccttggcttaaaaatcacaattcctatatcttttggggcggtgtgttcaactaatcagggaagggaaaaagtaaatcaaaggcaaggaaaggggagtatgtgggaaaactttcaattgcaaatggttgactaaggaaatcttcatggagaaaagacaccatgactatggcaactcttataaaggaaagtatttaattggggctggcttactgtttcagagatttcatctgttatcatcatggtgggaagcatggtgataaataggcaaggcaggatttttacaaccagattggcatgcagtaggaagagagtgatactgagcctggtttgagcatttgaaacctcagagcctacccccagtgatacacggcctctaataaagccacacctactccaacaaggccacaaagtcctattcctttaaaataatgccacttcctatgagcctatgggagcattttcattcaaaccaccatagatggttagtaaagaaagatctaaacaaggtgaggggaaggcatatgtcttatacatacctgaaacgaaggtcatgggccagaccagtagtttagatgaatttggagaagcccagggatcctgaatgaccaaaggtgcagtagaagatgatgttgagggttcaagcagttgagctgggaggtatggcacaccctatcctgtaagtgctatttctcccattctagtgaatttcagttatgctgggatattcgattctgatttagtagatctgagatgtgctcagagattagcattgtaaatgagctctcagctgtctcgcagttgctgctagaagtggtccagggatttttctctgtgtgaggagggtggtctttaggatgcgctcagtaggtccttgcttagaatgtttaaatccagacatgtaatataaaggggtggcattctcacacagtctagtgtgaagaacactggattttgtttgtgaaagctcccatcatagggatatcttttttttttttaacccagagagcagtttatttttctttgttgtgagccacaaataataggaccttgatctggattcctgctcttgtcagttttctgctaggcttgatccagagcatacttgctctgcctccttgatgtcattcatatcctggtgactggatgtcttcttacttagccctttttctccccggtccttgctccagtgtcccagtggctgtcagtcctggctatacatttcaaatacctggtgccttcagagttaccttctgagctgggattggtgggctattcctgtagcctcccctcttaactgtggtattgctttctgatgtttcagttataccttggtcaatcttggtctaaatatatgaagtggaaaattccagattgtaaaaaaaaaaatcacaaattttaaaagaacatgttatagtgtgctaagcattctattttattattattaactttaaaaatctcttactgtgcctaatttgtaagcggagctttattgtaagcatgtgttataggaaaccatagtgtatacacagttagaccatctgttctctcaggcgttcaccaggggtctttgaactacctcagtgggaagaggagcatgatttacaagtcatgataagaaacagtgtgctactatcacagtccctccatccactctggttccttttcttataatccacaacacatgaatcactagctgattttcaactctattgcattttgtactgagatagtcttgttgttgcataattacaatcttttgtatttgacacagggaagatcagcaaatatatcatgaatcagtacctggtgatgttttgtatcaggtatttatactttcctgttattagttctgagtcgtcccatccatacaccagctctctaagaatacttcagagtcttaaccaggatataggacctttgaaacagccttgaaaaatcagttgcctccaggttgcatatttctgttatctcccaatgagcttgtagatggttttgtgccctggctgggttggagaattttaatctcatttatctcagtaggaaatagtatacactatgcatcttagattggggctctggtcttcacctctttaaaaatatctgccacttcatttcaggggggcttctcttttgcatggttatattttggtgttgtatttaagcatttgtggggttttgttttgacatttatttattttgtaacataccaggagcctcaaaatagcagaagtcactgagatgtgatggaacctctcatgagtcttttccagagccttctgattcctaagagaaggcttcctttgtatttgaatctacttcgtgtttagatccagtttgcatatgtaggccttatttaagaatcctgacacgttgcttgcttgcttgtttttgtgagagtttcttctttacctccagctgacttaggagtcactctgtacctcaagctaacttcatacccctggtagtccttctccctcagtcccctgagttgtggagttacaggtatgagccagcatgcccggttcccattaaatgagtttttttttttgattatttttaattagggtagtaaaagaaaattagagtagtaaataattggagttgcaaaacattatcagcaaattgtatcatcatgtaccaggaatggatttgtgtgcaatacagatttgtaatatatttaaactaattattaactcaatcagatgggttggcttgcatgttatcataaagggctctgagatgtgtggccaagttccataaaatttattacttgaatattgctggatccagtgattccaataagacattgccttttgcccccacaccaccacaatagaagtggttgttatgtactattggaaagaaagtgtgtgtgtgtgtgtgtgtgtgtgtgtgtgtgtgtgtgtgtgtgtgtttcaattaacagtaattttttttgccttgaaatgaagttcctttcaatagtctgtaactttggaaaagccctggtactattctccttaaatacaagtacccttaggtagttagactcttctgttctttttgtttatttgtttgttttgttttgttttgttttttggttttttttttaaagttcagagcaataatatcacttagaccagtgaatctcaaccttcctaatgctgcaaccctttaatatacagttcctcatgttgtggtgacccccaaccttaaaattattttcattgcggctttataactgtaactttcctactgttatggattgtaatgtaaatatttttttagagatagaggtttgccaaagggctgaagacctacaggcttgagaaccactgacttagacccatattataggatgtagaaagcagaactttaaaaagaggaaaaatggtccactgcccaggtacttagcagacttgagctgtagcacattctaagttctgattatgaaagcaagtgctgagcatgccttcttaaaaatgttcaagttgcctgcaatcccgggccatgggaggtagggacaggaaagtcggaagtacaaagtcatcctcagctgtgtgacactgcctggcctattgtcttaaaccacggcagagtggaacaacaacagcaacaacaaaatccacagaatgacaaatgaaggtgttgagaagttcctttgactatctgggttcttcgctggctgcatatttacattctgacaaaatggctcaacttgtaaaaagcactcatggtgtaagtctaatgtcccagttcaaagcccagaactcagggcagaaggagagactagtatcctgaaaagttgtcctgtgacctccatacatgaactcacacacattatagacacacaataataaaaaataaagataattacaaaaagaatccctattgctaatatttgtatttctaatggcttctgtttctttaggggttttgtatgttctaggtatgaggaggtgttgtctgaaggtttgcatcgtagttgtcaggcatttgagcaagcacctccattttggaggtagtagtaactcttctacctttttcatttaactgctaaaatatattttttcctgactttggtacaggaacatggttgaaggatagctcacaactcttccctgataactgtgtagtgtaagctaagaaacccagcaaatgtttatgggcatgcctatcttgcttggtcccttggaactctttcctgggaaaatcagaaagctcgtttttttttttgtttttgttttttttttttttttttttttttttgtggaggctgatgccatcttttcttttgcatgtaggaatatgaccgtactcttgtaaggtgcttttacttgtgactgcagacttgggtccacaagttgaaagacttcagatggtcttacgtggtttgggaaactcatagaaggggtttgggactgcatccattaaggcgaaccttcaaagttctgtttatagatctgtaatgtagccactatagtagcaggctagagacaacacgatagctaatgtagtcactgtagaaattcagtttaacataatacatttggaatggtggtaagtgcttgtagccacaggaaccattctccaccccaggtttttatcgctggagtttattggggctttaaatttgtttcacaatttagttacagatctttggcatgttacagctgagggtgggagttcttttcttcctttaaattccttgcatctacactggacatgcaattcagcaatatccagtgtttggaacattaatgcagttcgtggattaatctccaattccatggaagcctcagatagcagcctaatatctgttaaatgaacttactttttctccatttatttagatatgaggtatttgtccagataagcatatgtcttcagttaactgcaaaagtgtgtaaacagtgcaatgattcttttggtaaaacactgtattgagtttatcttttatgtcaacagtaagtgcttaggaatgatagaagagagatacttaaagctcaatctacaaggccgaatacattttcctaaacatcacttctgactttctcgtagatagatacaaacatttgcttagtggcataatggttatttaaggtctctttttatttattaatatatattcatgaccaagcaagctgctgagataaaaaggtcaatggacattttatgcttagaaaataataagtaaatcaaagttgagcgcttgatctgggcataggaattgctgagataagacagtaatcctgaacttaatcaggttgaaattgaaccttcagtaaaagctggattgtgattcaaagtgggagctacaatattctttaggttttgcttaaaatagtgaaaacggcactgagtgtggtgtcagaaacatttggttgctatcagttgctgctattgtaaatgtaggtcagtgagcaaatgtcgtgggcatgagttctattgtgtgggaagtggagacgctaatcctttcccatctctcttcactcactgactgggtgggtaagtttgttttgggaaaccgtgtgtcatgggctgtggagtggatgctgccagttgacctgctgcaatctcaaactgaaggagacaaatggcttgcatcgggaaacaacatagaaaggacacttaagagatgagaaaggactttggcttctgaggaaatgagtttggaggcaaggtctaaactctgagaaggaaatgagagattgagacacagggactgcctgttgggcagaacagcaagaacataggcccagaggctgaggaggagacgtgtgggcctgagtgggtagtgagggaaagtaaaggctcatctgaaggcaaatgggaggagatctggcagcctctcttcagccaagtaaaagcaatgttggtcatttcataagcagaaagtgttataaaacggtgtgataccatcttttaagattaatttttattgtatttatttaaatttttttcagtgctgggaatagaatgcaggatcttatacatgctaaaagtactctagtgctgagtgaaatccccagccatctaacatcatcttatgtaaaacaaggatgagagagcatgcggtagttcacattgccactaaatatgataggagagttagaaagaagaagaaacatgtcctgatgcgttatttgacctgttgatggggtggtaaaggattctatcttcttgaaacagggtcttgctatgtatttgtgccggggcttgaactaatgccatgttcctgccttccaagtactaaggttataggcctttatatatatatttgcctagtggcttagtggcaggattcttaaagtgaccaattgttaatggtattgaaacaaatgaccctgaatatttggcccttggaacaatgtggagcagtaagcgtgtacagaactgagatgtcaacagatctctcttgctaatattacacctaaacacatgttcaaaaacaattttgaaaacctgtatctcctgaagaatcatgggaaatagcaccagatggagtctgtgtggccgattataagagtagattgattgttcacctgtgtagcattaggaactcatattccatggctactgtgaatagctagtaaaacaaggttccaagagacaatgggaatttaatgcagataaagcctcaggcttgatgaactcttattagacctcatgggagacatttctccactaaaaggtatacccctgaagacatcagcatgtattacttgaaataggaatgaaagtgtgttttgaatcttatggtttgagggatttgttgaaaaatttaaaagtgagatgtagaagctacagtccagttctcatggtcggtccattggtcatgagaaggcaactttagcctttcatttctctgcgatgagtgtgggcatcacctgtgaatttccagtgaactgaattttcatcaagacacaccattaatagacaactatgttttatggtactattttttgtttgttggttggttttcaatacagggtttttctgtgtagccctgattaacctggaactcactctgtagaccaggttggccttgaactcagggatttcccagcccctgcctcctgagttctgggattaaagtaatacaccactacctcctggctgtatggtactgttagcattagtaatgttttcagttatctctcagagttgaacttggataaaactcatgctgacatcaaattttattttaaatgtagattggggtggtaatattatatgtgagtaaagccagagattaataaaggtggggagaggaggaactagggagatggctatacaagtgtgcagacctgaatgtgcatctccagaactcacatagagcatctgtgacccacgtgtacctatagccagatgggaaggggagacagctctcaaagctcgccagctcgctagcctaacatagacagtagggaacaaaagacagcctcaaacaaggtacaaaggtaggaccaacatcaagattgttctcttaaccactgtttgcataccataacatgtttgcacccgaagtcatacacagaaacatatacaatcacatacatgtatttactgtatacataaacattatagatgctcacatttttttaaaggttagaaatgggcaaacgtgaagcacatttatacatttgactgtacaggccagggtggccaacactgcttgccttctgttatgaatgttgcactgtcaccagctcattggcggtacatcctcgtctcttgacctgagatggctgagctgggattgactagattctggggggcagtgcgtgcatttctgcccagcccatgggtatcagtgctgctggcatggtggcatggccctgccactgccccgacttacatacttttccttgttttcaatgcagttatgttaggtatatggccaggggctctcaggagccttctcatcctctcttttttttttctcccagaattaccagccatttcctttttttcagttctcatcatgttgcataatcagtcacactctgctgtgaggagagcagtattttactgacagttgttgaaatatttccttcattccacaaaatggggagctttacatgctgtacatggttctcagggctgttgtgtgaacggtgcagttctaatgctgaagaagccgccgtgactgtaagcacagcttttcgactgaataaagctgacttgaggatatcatgaaatctaagcaaacaacttcactttctgctttcagatttgcatcactgtatcagccacctccctctgtaagtgtgggttttcccatggagtttctgtaaaaatatcaaatttcctgagggttcatttgcatgggatgctattgcataatgagatggatgttgacaagggcctatagtggtgtaaccaccaccatgataaagatagagaaaagtagcttggaaatttccccatgctgcctcttgtcctgggggcatctgttaacctgttttctggcctgttttgcttctcaaaggacacttttgtggtcagatgtacgtctttgtttttactcatattcttagggctaggaactttgtccccagtgcaggccataggaattacaatttctcttctccaaggcagaccataatcttctctgtactcctgtcttagagctggctgcaaggaaactccagcccagtccaatagtaagactcctttatttcaaagtaggtctgtcccatgaatgggggaatccatgtggaatcagaacagaagggcttctaggttcccccctttgcctgtcagtatcccttttgtccaatcatgtgtctatatggatgtccaggcttcagtcatgatgctttaataaaatctgcataagacccaataggacagggctcatagagcttccagatagagcgtggtgctcccacagagcacagacagcagggtccatgtgggttcctcgagggtggtgctcccacagagcacaggtgcttcatgaggcttctgcatagctctgccttgcatctctccatctacatcccttataataaactagtaaactcaggttccttgaattctgagagctgctgtagcagatcagtaagggctgaggaggaggttgtgggaacccagtttttcatcgattaggtcttaggactgacacctgaagtttaggccaggacagtcttgggggctaaacctcaattcttttggatcttacactataatgctagactcagtcaggagacccccagttggtggctgctgcagaattgcttgcttacttgctggtggaagagtgccctacacatgctgagccacagaggttgtgtgatgagtgtgagagtagaggggggtgacctgtttttaatctgtttgttaattatacaaaagaatagattcatggtgtttttcccatgaacagtggttatttactgacacgccttcccatcttcaccccccctgctctctgttgtctccttccacccacagcagttcctttcctgcttttatgtcacaatgctctgtttaccccctcccacttccttaaaccctctccccaccccttacatggtccccttttgtactagctagtttatgtcagcttgttaccagatagagtcattagagaggagggaaccttatttgagaaaatgcttccctaagattgggctgtaggcagacctgtagggcattttcttagttagtgactgatgtgggggggcgggggagggctaggctattgtgcttggttccacccctgcgctggtggtcctgggttctattagaaagtaggccggctgagcaagtcttgggaagcaagccagtaagcagcacccctccatggcttctgcatcaactcctgcctccagattctttgtgtcttgagttcgtgtcctcacttcttttgatgatgagctgttatatagaactgtgagtgaaggaaaccttttcttccctacattgctttcagtcatggtgtttcatcacagcaatagtaactctaatgaaaaagacacctttctagcttcatgccctctaccgaccctcacatccacataaaaatacttgtaaaaattaagagcttggatctgtatatgggagtgaagatgctgtattttttttactctggtgctacattacttaataatttccagatcagctttccattaagttttatagtttcatttttctttatgcctaaagaaaattccattgtgcatatatatatacaatctttttattatccattcatctgttgatggacatgtagtctgattctatttccatgttcttataaatacaacatcaatgaacaaggatatacaagtatctctgtagtaagacttagagtactttgggtgtatgcccagattcaatgcaaccccagttaaaattctaattaacattctttacagaactataaaagacaatcttttaattcctaaaaaaccatgaatagccaaagcaatgctaagcagaaggaacactgttctaagtatcatagtacttgacctcaaattatattacagagccatagtgacaaagacaccatgatacaggcaaacaagtagacacatagatcagtaaaacacaataaagggtctcgaaataaactcacacagttagggctacataatatttgataaatgtctcaaaaagatgtactgaaaaaaactcagccaattaaaaaaaatggtgctggcaaaactggaaatccacctgcagaagaatgaaattagatccacacgtctcatatgaaaacatacaattcaaaatggaccagagaccataccttaaaacctgatattttgaaattaataaaggaaaacataaggcttagtttttattcagtcatatcagtagaataatacagtgtgcagttctatgtgggtttgacttcttttcaccttagattcattcctgatgagccacagacagtggcttcttgtcattgactagcgatgtccattgtgtggaggttcccatttgcttatccaccaagcttgaaggcattgggtactataaaagttttggtgatttatggctgaacattcataaactatggtgttttttaaattttttctgggccaatacttagaagaaggattttttgggacttatgtagtaaatgaagatttagtttcataaaagctgccgtgaagttttctaggtgtcctcagtggcagtggcacactcccctcacacccagaccaatatttgctattgccattgggcaatatactgtggtctgttcagatagttctatgtctgtgacattttgaatatgactggccagaggtgctcccactggctgggccccaagagcttgcaaataggagcctcttagatgacattaactcctatcacttcctaccactgcacctccattgctgttctggtctggtcctggcctcccctaggggtcacccctgtgaagtaccaattctacctgttcacaggaaggacccaagtaaggacacacaaggcacttctgaacagctttaacagaaaggggccgctcctaataggcttattaaatagaggtgagacggtgctgcaaggtcatctgctgccctgttgagccacacatatcagtctgtcatattttaaattcccacaactgttacacacccagtcttcccctttatggagagaatattgtatttgaagtgttgtagttgaccagtaagaaagcccagtgggcaaaggcattggtcatgcatgtcttctatcccttaaacttacataaaacttgcgagagtatattctctccttccaccatgagggtcctgggggttgaactcatgtcttcaatgccatcaggctttaccacaagtgccttcatctgctgagtcatctcactggcccactagaaagctttattttccttttgcaagaaatctgtccttaattcatattgttcaagtccagagacttgtcattagtgtttgtatgtatgtatgtttgtttttatgtccacatatatggtataatggatagccagaattgagaattactagttttaaagacaaatgtactattcctgaagttaactctagcatatttctacctgtcaagccatgtactatttctgatcgttttcgtgtgtgtgtgtgtgtgtgtgtgtgtgtgtgtgtgtgtgtgtgtgtgtgtgtgtgtccagtttctatggttatcattaatgacagtattgacccagttatatacagacctgatctctcctgggctactctctgtgtcttgagtcattcttagccagagttccccccccctctctctctctctctctctctctctctctctctctctgtgtgtgtgtgtgtgtgtgtgtgtaagtgtaagtgtaagtgtaattgtaagtctgattgcatgtatcttggaggcctgaagagggtgtccagtcccccccccccccccgaggtggagttacaggtggttgtgaatcaccttggtaagggtgcagggaaccagactcagctggtctataagggcagtaagcttccctaagcatcaagccatctttagacccactaaaaatagacttaaattttaaaaaaagctgactaaatatagtattattaaatgttctttttggaagaacatagtttggagattattttatattaagaccacaattattcattttgggagaaaatcatattgcggaaaatgaatgagtggtcatttccaggccattcctaaataactgttacaaacatattgggagttgaatgttgaactcattcctcttcagtgcacaagtatgaaaatttatttgagctgtcttgggtgaaacactcggatttggtagtgaagacataaatttcagacttggagctgacagtggggttgatggaaacctgtcaaacttctctctacactggcagggcttctgcatggttccctcaatctgtggtgtcttgggacactgtgcttggcatgtagtaacactcaataaataaatgactgtctagacaggctataattgtgcggagtatagaaagtgcaacagcattccaaacaaatgcaaatgtctatcattcacttctaggaaattaaaatacagaatggtgaagaaccaagttttaaaacatttattcagactgtccggtccactctgctaaaaatactcagttttaaaccatttgccagaggtattggccaagggaggttatggtgtcattgactccatcctggctccacagtgctagagttgacatgtgttatgttctaggctccaagctttctgcagagacatcccagatgttgggctcttctggtagaagcaatctgctaaggcttgttacacaaggcatgatggagtaacttggatgttcagttgggaacaggaaagatccagtgagctgtgctgactgtctggctgaaaagagagagagagagagagagagagagagagagagagagagagagagagagagagagagctctctggttcttgacacaggcttaagccagtggatttatggtggttcctgggaataactttctaaaaattagactgccccagaaaatgtagtaccttgtaggttatgaagagtgtgctctcatgtgtaggatagaaagtcagacaagatgcctgccatgctgcttaatttgggtcaatttgacacaggttagaatcatctgggaagaaggatcttcaactggagaattgcctcaatcagattgttcgatgggcatgtctgtagagcatctttttgattaatgattgattttggagcgcttagtccactgtggatggtgccatctctgggcaggtggtcctggattgtatagaaagtggccgagtgagccatagacagcaagccagtaagcagtgttcctccactggtctctgctttagttcctgactccaggttccttgaattcctgccttgacttcactcattgataagagtgtgacctgtagttgtaagatgacacaaaccctttccttcctaagttggtttcggtcatggtgtttatcatagcaatataaagcaaactggtcactaagtaaggacttccctagctccaagattccaggcttcatttgtgggtcaatcacatcatttgtgtacagtagtacaaactgtagactgctcagttgaacttgggaagacctggtgctgcttctacttgttttggtttccttggtgagaatttttatgtgtttcttgcgtgcacaggattttgtaggcttggtgtttatatttgttagcctgctttccaagatgaactatgagggcttaggctcttcctatggacagcgtgaggacaaaataatggaacctcgtgcggatgagggataaaggagcatggatgggtgcagttttccaaaaccctgtgaataactgttagatacaatcaaagtgccaggacttggcatgtatctcagtagagtgtttgcctaggatgcacaaagttctgggtttgatctccagcaccccataaactgggtgtggaagtgctcactgtaaccccaattcttgagaggtggaggcaagaagttcaaggtcatcctttgggtgtgtagggagtttgtggtcaccctgggtcacacgagaccctgtatttaaaaaaaaaacccaaagtgctctgattaggaaatacttagatgtttaaagtcaggttgacctggtattcaagtccttgcatagatacttcctactttgggcatgttacttaatttctccttggcataaggtcagtttcattgttcataacattagaacagttcttttgttttgctgggttctggagaaggagaaggtaaatccagtgggggaaaacctgcagtaagtaccagctgtcccaatgtcttttattatgtgatggttttgcatcatttccaggaactgtgttgtagcacacctggcaaagtacttacctcccatgcaggaaccctggctttgatccttgatactgcataaaataggcacacaatcccagcaggcagaaagatcagaagttcagggtcatcctcaagctatagagagagtttgaggctaccctgaaataaggaacacaaaaagtcacctacttgttctgtcactctgagacaggtaccaactttgggattctgtttatttggagattaagcaagatgatgctgaagtccagaacaaacacctggcttttattaagctcataattgtattatcacagctacttggaaattgataactgaatatcctgagagctatgaagaacaaaagggataagataaaagttatctgcttgggctacattgctgtctctgggcatctaagagtctctgtctcaattttactttagctttctgttattgctgtaacaaatcaccacactttatataatgttattaccatctctcaggacagaagttctaaatccaatcaagtgttaaggaacacgtgttccttctagaagtttcagatgagactttccttccatgcctttctagcttccgagggtcccttcatccataggcttgaggccccttctacgcctacaaagttcaaattttcagacttcttgtcatttaggcattctttttttctccctgagttcaattttcttgttacatttcttctctaactactttgctgcccatccccatcttgtgctgttttaagaccggatctcacatagcttcaagctagcaccagatttgtgtaactcaagatgacttttaagctctggatctcttgcctccacctctcaagtactgagattacaagcttggcctgacttcttttccttcacaaggattcttgtgatagtggtaagccaccagagattccagaaaaaaaaaaaaaaacctttccatctcaagatttttagcttaatttatacattaagtcctgttattctattaggcatctttccccagcttcccaggattaaggcataaatgttttggagacctattatttagccgacaatatatacctgcttgtcttagagattatatatctgaaatcatcgggagtgcacatcttcccttgagcatccagaggttaaaaaaaaaatagtgtaattgtatagctctgaatttatttgctccagtgtcattctctttgtgcattctcaaatgcacaaaatcaaactgaaggaactgaggaagaattcactagagacatttgaaccatggacttgaaatggaggtcaaagaaaggtgtttgtgtgctgttgtggagcatattggcttctgtgaactgggtgccaggatgccatgtttgtgtaacctagactaggtctggagcattgtagccctttgaagataacatcttgccaaaacagagacactaatataaagcttcctagggacagcagtagagaatggcatgtgccagctgtcttgtccccatagactacaagaaattctcccagggtctgggaaacacatggtaactctttttttttatcttctcaaatgttctcagaaaacaccctgacccccaccgaacacacacacacacacaaacacacacacacacacacacacacacacacacacacacacacccctctttttttttttgagataaggtctcactgtgtagttctggctatcctggagttcactgtgtagatgaggctagcctcaaactcatagagactggcctgcttctgccttccaagtgccgggattaaaagcttgcaccactgtacctggttcctatgtaactctgaagttacatagaattatgtaattataaattacttttcacattgctgggaccaaatttctgactgaaagcaaactaaagagagtggggtttatgggaagagggggaggaagctacgagagtgagaagggaagacaaggaaggatgcagaggttacgaggaagcagaaattttgagccaggtgtagattagaagaaaggacatatgacaggtaggattttagttgggggtggtagaggaggaagggcgggagaagggagctgggatcgtcatgtaattcaatattgtttgtaattcaaatatataaaaaataaaaagcaaaaaaaaagagcatggggtttattttggctcacagtttaggaggcttcagtttgttctggcaatgaaggcctgctggctggcattggttgttttgagggtagtggcaacactgcagggcattcttctggtacaacatcaacaattattcttctggaagtggggtcaggctatatccttcaaaacctgctcccagtacccacttttgccagttgtgaccgcctcaaagcagtgctacaacatagagaccaaatgtctggacctgtgagtctgtggaggatactgcacatacactcttgacagtgactggcaagtttggttcatctgcaaaaactgtcatttcccgcatctttttgagtaactaagggagtacatttggaattaggatgtgcaggcccagcctcctgactgcatggctctaggcatgctcttaatctgggggacatctaacaactgctgtgttctgttgtaatactaggactcactggctcgttgtgtgtccatgcatgctggcccagtgcttaccgctaatttagcacctttgctagtggtattactgaagtcactaactgagagggtaagaaaacagttaagaaatgtcaaggcagactcaggtgattacaattgcgtgttctttaaggccaggggccattagttcacctatttaacggatacatgtattaggtatgtctgatatattaaaagagactagaacaacctaatagtgaataaacgagtgagagaagagaaccaataaatggaacaaataaatcaatgcatggtgttaggtggaaataaatgttaaagaggaaataaattagcatgtaagctatgctgaagggcatgggactttcatggaagggggggtagggaaagcctacccaagaaggtagcattttaataaaaacccaagagcaaggggatagggtaagtcagagatttctggaagacaccagaacaaacaaacaaaacccaaagtaaacaaaaaaacataaaaccacccaaccaaactaaccaaccacctacccacccacccacccaaacaaacaaagaaacccaaaacaggtgcaaaggccccaaggctgggagtattcttagtggttgagcaaataaatcctggtcttctgctctctgagagttacagaaggtgctaggaagtagggaattacagttgtttgaacattatgctgtttggagaagtgctatgatagtttcacacctatggctttaatgaagggcaaacagtgtatctagactttgcctctgttactttctctcacttttttcttcctttcaagatttattgatttttattttatgtgcctgagtgtttttccggagtatatgtctatgtgtcagcgtatgcccagtgtccactgtgtcaaatacctggaactggagttacagacagttgttagctactatgtgggtgctgggaatcaaactccagccctctggaagagcagtctgcattttcaaccactgtgccatctctgtagcctctctgttccttgctgaaaagagctggaaataaatgtgaagaatgaagtctcggactttaggtggttgggagcggctggttaatatgaactgtttcatctttggcacttgagcaggtggagagatgtgtgagctggaagacagaacacagcctcaggtgtctggcaactctagtctccaacctgttcagcagattacaaagagagagccagaatcagaagagagtgctgtataactttctgaaatcttgggttactaaagcatgacatctatgtccccagtgcagccatttctgtgtgaggtttgatgagtgctgactaggcgtatcccagtggtgtcctgacaaattggacaaggatctactcttcagggacaatttttttttcctttttggtctctctctctctctctctctctctctctctctctctctctctctctctctgtctgtgtgtgtgtgtgtgtgtgtgtgtgtgtgtgtgtgtgtgtgtgtgtgtgataaaaatttccatcattggtaacatcaagtgaccaagatgatgtccctgaacatggtgttaaaaagatctggttggatctggtggtagtcagtgggcaggacaaagttttgaggagctgattcatgcagttgggttagtgtggtgatatatgatttatgatttattaaagcttgcctttgggtacagaaagcatagctagcagtaagccatagagccaggcaatggtgatatacacctttaatcccagcagccacactagctagccatagagccaggcagtggtggaacatacctttaatcccaggactcaagagacaagcagatggatctctgttagttcaaggccacactgagctacatgaaattgatgcagtcctaaagagaaaaggttcacacgaagatgatatcagtacttgaaatcacatgcctttaatcccagcactacggaggtataaaaagaaaaggcaaagggcctcaggtgaatatttattctccagccacactgaggacaggacagccctttcagcctgaggcatgggtaagcaagtgcctggctgttttgcttttctgatcatcagcttgaagcttgaaccccaatatctgtctctgggttcatatttttcatgttacagatcagcatcagaatcaaggcagggacattcctttctccaggtctctccaggtcagcttcctgtgccaggctgctctgatccacttcctagattccctagattaagtttactgtgtgtgcctgtcatcaactgtgtattttggaattcatagaggttagtttttgccaacttgacacaagctagagtcatctgggaagaggaaatctgcacctgagaaaatactattgtcacactggcctgtaggcaatcctattctcttgactaatgattgatgtagaagggtccactccactgtgagcagtgccattctaggacagatggtattgggatgcgtaagaaagcaaactgagcaagccaggaggaacaagctagtatgcagtattcctccatggcttctgcttcagttcctgcctcttggttcctgtcccaagtttctgccttggcttctgctggtgatggactatgaactaatgtaacccaccttgactatgagctcattatgtagttacggctgaccttgaaccctgaacgttctgactccatctcctgagttctaggattacagatgtagcgccatgccggacctcagtagctttcagctaaatggatgtttcataacttatttagccatttgttaatggtcagttagaccaatttgactctgggcatacctgtgtgtggatattttgtttggagatatatttcctgtaggtaaattcctagaaacaaaatgtctaggttatgagaaagattttataaaaagtcatcaaaaatttcccagagatagtgaactgttttccatgtttaccagcaatgtattattctaatgcacaatgattttttagaacttggcattgtcagtcatttttgtttagccactctgtctgctgtcttcgatgcaatgtctatttcaatgtttgctcattttaggagtttaatttgtggggtggaggtataataaattacttttcaaaaaggaaatgcagaatatggagaaatccgttaacagaatagataagaatgaaaaccatgtagacaggcatcgcaggagaaatgataggtttatcaagtactggtgcttttaacttggagaccatctaccctggtttgcctggcacggtctttctttctttctttctttcttttttttttttttgtttgagacagggtttctctgtgtagctttggagcctatcctggcacttgctctggagatcaggctggcttcgaactcccagagatccgcctgcctctgcctcgggagttctgggattaaaggcgtgcaccactaatgagcagtgcgatggtacagtttcttgcatgcagggcatgtatcgggtctgggcagacttcttccaggtgagcattccttttgcaaaataggaaccatctgcagggagatgcagtgctgatacatttcactctgcgtatatgggtggacataatggtggttagtgatctatggaaggtcacacagctctttaccaagagcaaagccagcttataaatagggcccagcacaccctactcgcttgtatcttacctgtgatgggaggaatcggcgacatggtgaagcttataggctgctgttaggaaaagcttaaacaattaaataaattgaactcatttattttgactcattcatactttactgaccaaaggctattgtgcctggagaaaccaagacactgagttctgtaatcagtcattcacactgtattataaaatgctttggaaaaccctttctccagaatttgctttgttgttgagagtgtagttacaagaaaattctgagaagctactactaaagatgacactttcaaaggcttgagagaattaggcacaaaggatgaaaatcatcttagcagagttggttgctaggcagaaaacaatgagtacagctgggcagaacatgcaggtccagggccaaggctattactctttttcctttacacagtagtatggaaggtcagcccttgatatatctcatttgttcctgataaatttacacagtgtacctgattcaattatagactgtcccttgttttggtccctgttgcttttacatgacataaacacagtcatcttttgtcttacattgccccaaaggacttagatggagacttgcttataaataatgctactattttgttttcatgtctattttttaataaccctcaacatgttacagcatttttcttcttaatgtttattaaatgccctcagcaggcccagtcctatcaaaagaatataaaagacacaattcttgtcaataagggacatccatattaataaatgagacataaatatgcttatatatgcatgtattttttccttacaaagcaatggattgctttgtttggatgagaaaaaataattggatcaatgcacatagttgcttctgctgctgttttgcagataacatctcaacccacagttgtcacaatcacatgaccttggcagaactggtactccagttaaggccaaatgaaaccatttttattgaaatcagccacagttggatagacctattagagaccaaaccatatggagctctactgtatgtgattttaacaattgggtgactatgatttttagatccttcagcaagcccttctgtgatcctgcttgtgttgagctgggaacagacacatctcagcctcagtggaacatgcagacaggtggggaatgctagtttaagactgatacttgtgccaatcagggttaaactccaggcacatcttaggattcccaaatgatataatggatgtgacctcatctggggagtggcataaaagatgacaaagaggaattgaggaaatggaggtagtgagggtgctgttggtagaggtgtcatcaggcatggctgagtcatggaactgaaggttccatggctggaatgcagacactggggagagtgttagactgcagagggaggccaggccagatgctgcaaccctgagtgtattcattcagtgagttagggaaagtgtaagcagtcattcctgtgttagtgtgtttaatatgttcttcctatattgattgactgttagaaatgtttaatatgatcttcctatcctgattgacttttagaaacaaattcatgaaagtgtattagatttaactaattattatttgagaacaaagaaaccacaaaaggatttggggcaggagtatggcacaaccttgcatcaggttgcttttgtaggtattactccagctccagctagcataagaagtatttgaggcacgagagtggtacagttccatgagaaggtcagaagcaccttgtcatctacaggatgagagggtggacacagtgggccatccaggagcttgtggtgtatcttttgtcagtagctgatggctctgaagccatcaatagagcatctctgagctgattgtgcaaaggtatggctagttttaaagaacttccagtgtgtctagtttggagttgtcagagaagcctactacagagaattattctatgatccactaatttggaaggcatttatgttaataaatagagtagaaacaagcccagcagtagtggcccctgcctttaatcccagcacctgggaggcagatctctgtgagttcaaggccaacctggtctacaaagtgactttcagaacagccaggactgttagcaaagagaaaccttgtcttgaaaagacaaagataaaaacaaaaacataacaaaagagtagaaacaacagggacagtcaagctttcagaactgcccttgggttttcaaagtcataccctggtccactaccagaaagctaagggattaggaagctattctatgaagtgactgcaggtacaactcttatacagtgtgccgtttcctgccagcttaccaaaacaaatatggcaaaaaaccccacaaaaacaaacaaacaaaaaacaaacaacaacaacaacaaaaacagtatcacccattgtgttccagagaatgctaatgctcaggcagctaggtagcaaatgccaagacctctgccacagtcctgagcaggtccttcaagaagaggcctgggaatgcttgattttgctttatagctggctggtacaacctgcaccatgtctgctaacttgccgtataagtagggtttagcatcttagctgtgcattatgcagggatccgccagaaggatgctgccactgtgtcatttgaggtcatggacagagtccatgacagaactgaactaagctcaccctgatgttagtggatatttaccaagcacatcacacttaatcctagcagtatgtgtttgggtattcccaggacccagggctcctccattagtcaattacagctaatgatatttagcttccagacctcttgaggattaagttaaatctgataatatgtaggaaaggaacaagatgcctgacacaagttcagcgtttaataaatgaggcatcaacccaaaaaactacagtatgccactgcttatcttagtagtaggaccagaatccccaaaagaagatggcattgcttattgttgcataaggtttggtggcctgggtagaagtagcctttgcacaggccacatggaacttaaggagtgtatatacactggaaaatttgctggcatgggtgtatatgctatttcagttctttttaaattaaaatacatatgtttttattccctgagaatttaatatatgtattcaatgtattttgatcatattcaccccaactccctccccccacaactcctcccagacccacccctattacccttactctttctaattttgtgtcgtggtttttgttgttttttaaataaccaaccaaaaataaaatttgtactgcctatattttcacatgtaaggggccacccactggaggttgaccatgatcttaaagaaattgacttgccaatgactccccactaagaggtggaccttcagtgtatctttctccttcatgctggaatgttgactggcttaatcttgggcagctctttcgtaggcaataacagctactgtaagtttactagtaaagtccttctttcatggctggaagacactgttttgctttggttcttcctgacctctggttcttggaatttttcccaccccctcttctgtgatggtgcctgatctttgggagaactgaatatgatatagaccacccatttgtagccatgcactccacagacactctcgggccttgtaccattgtgagtttctacatcaaccattgtccgctcctcaaagaaacttctctgttctttttttatttttatttctaatgagtttttcaataatacaaaagctacatctataaacaatgaaagtatggtctctcttctttggatttaaaattttattttaaaaaatattcttatactacaaaccatagagctataaatttgtcctttttcctctttgtaacaattgggccatatagtaggcagggtgcattgatgggagagcttgtgggttcaagatacctttattcagataaataccagccaaacgcaagccagagtgtgccaggggcagctgagcagcgaggccagggagaaggggaaggagaaggggcttccatgcgctctgcagtcccttaagagcccatgctgcgttatcctgacctcaccttgaagatgccttgacagctgtggtcaggcacacctggagccagcctccaacaggcgtggcttactgtcccctacagtgcacaactttctttattcttaattcactatatcttggagttgaaactacttttatttgtatagaaataatgacctcttgctggcaggtgggtgttttgaacatttacagagttttctctgacagctgttcataggtgtctgtctgcaggagcacctttagaaatagaaagccggggtccaaggtcagatgcagtctagactcttcaattggcatctcatcttgtatttttgaccagttttgtataaccacccttgctgcctacacacctacaacagtgtgtcatcaactgttttggtttttggcagtgagggctgggaagtgacgagctaataacagtgtaggccagaagtaatcctggcaagtaaagggagatgaaagatgaattagaagaggtgagagaagggaaggattccagcaatgactgtgtgccaagcgatgacttgaccagacgcttcatgttctaacattcattattccacatcaagaattaagtattctctttttaaaaccttatgtgtgtgtacacaaaagtgtgcctcggtacagggtgggatgtcagcatacaaccctggtttgaggcaggttctcttgtgccctgctgtgtatgctaagctaggtgacccaggagcttctggaggttctcttgtctacaactcatctcacagtggaggtgctggaattacagatgtgtgctacagtatctgcccttatgtgggttcttgggatttgaactcaggtcctcatgctttcctgagaagtactttccccactgaacccatctcctaagttccccctaagctctcttattcctgtatactttgatgaccagtgtctgcccacactacctcctgtcaactcagtttcccaccaaggaaaccaacacacaaagaggctaaacgacttattcaaggtccaaaaccagcttaagttgagactggggatccagtttccaactccttacacactggtttagcctgggatttcagtctatactagaaaagcctcaaagggcttgaatatgtgcacaggatgaatttcatccagagttggagcttaatgtcctcccaggcaggccctgaagtggggctgtgacctgcggcttcttcctgctccccttgctcaggaccactgagatgaaggattcactgtgacttcctcggctgtgtatttcacttatttttgagtcatctgtgtagaccagggtgttttccacttgaataaaaaaatgtgaggcttggggcttcctcttgagttttaatgatagtataaagtcccatgaggagacaatgtcaatgtgacacagaacatgtggtgagaaaataacaaggagacagaccttggaaaacaaccttgtttaatgaaagaaattaacctgggccaaggatgttttaattaagaaagcccaaggtctaccttataccaactggacaacatcatcacagtggtcattcctttagtgcagagccatgagcatctagagaattagacatttattgtatttgcctgaagcaaggaaagtgtcactgttaaaaaatggaatatgagcactgcagtggtcttagaaattaactagcccaaaatccaattttctagaaaagggaacacaggctcacgagtacatgctgttcaactggggtgtcagcagaattgagacactaggcccaagccctgcctgtgtttttgagttcagttctcattgggtgattcacagtgtgtgtgtgtgtgtgtgtgtgtgtgtgtgtgtgtgtgtgtgtgtgtgtgtgtgttgtgtgtgtgtgtatacaaagtatacaaagaggtcagactctacctccctcaattgttctctttaaatttatttactattattgctttctgtgtggttgtatgtagggattgaggagtatattgtgtcacagggcatggggggcataccagagaacaagtgggtagtcttatttcttttctttcacctttatgtgggttctagatatcaaattccagtacttgagcttacaaagctaagtgcctttgatgagtcttcttgtctgtccatttcctccttatctgagacagggtacctcaatggacctggagctcattgatcagctagactagctgactaaaaagttggccagcagatctcagggatcctcctgtctctatattccccctccccacaagcaatggagttatacacacttgcatgcctcctttatactttggggctgggaatccagactcacatcacaatgttatgtgtcaagcactttaccaaccccctttgctataagaatacatttggtgaatgtctgttcattttgtttatcaaagcaggctggacatatttgcagacctactggttttaactgagaaaaataaaaatgaggaaatgaactcatgttaagagacaagaagatacagtagataaagccatttatccccagagctcaaaaaattgttctagaagttcccactccacttgagggctgtgcctacctactgtctcctgatctaagtagtgttgctatctttgtgaatgatcaaccgctgaagacatgtttcaaattaactgtataaataacccatcggtgtccttcactgtccatttctcaccgcaaacagaatgcaatgtgtttttataactagagagctatttgactttttccctctttcccacatttggatatagattgatatagcattacttaaaatgctgcatataaattaaacattaagcaggcgatatggagaagctaactgccccaatagaatctttagttctgcagtcactgcctgaaggacactcatatttcatatcggatgtccttcttttgaaaagtgaccaccaaggttcaagtgacatttaagtatatcaggcaggtgcataatttatgggcctttttgttttgtgttcttattttaatgaaaaccaaagaagcagactgtcttcaggcattaacatgtttcccctgtgcttttcctcccaccacaccctgcagattggtgcactgacggactactatcacttctaccatagtaggaccattaaaaggtctgttctctcgagcagaggaacccacagtttcatttcaatggaaccaaaggtaagagaaaccagttggacggggaccaagaagcaatgcttctgcatttttcattggtgataacactaggagccagtgatcaagcatgaagctcctgtttctagaactgtcacagtatcctttggttcagtgtctcctctcaggcaacagtgctcaatggcttgatttttattgatgggccactgtcgtgccaggtgtggagcagccatagagatgagcttttatgcagaattgagagaggctgcagcttgggaagatagatcaattgaatgtgtctcaagggagaagggcatgccatcatctctcatgcatgcagcctgtgttcctgtaagctccatgggtgacttttatcccctagaactcttaagccaatattgacttacatcaacacttgctattttccttggcattgattgtctagaagcagaccatggctgggatagaaaacatgcttgcacccacaggggcaaaagccagctcctattcttggggaggggggtcatctgatatctttcttgcacctggtccttttgggctgtacagcagtcctgggagaccctagaaagaagtaatgacaaatatgggtctcccgtgtgataatgtgaggtggctttagcatgagatatgggaaacaggaatattggggacaaactaagagaagacaagtaaagacattgacatcaagttaaatagctgtgtttattaattaagttagaggaaggaacggatcacagtagaattagctattccagacatgctaagtaatggagaagcagaggtagccatgccaacttaccttaggacctctgtgggttcatttagtgattaggttattttgcctttcccctccattgtgattttggttcaccatagaactcattctcaaataaattggcaaacaagtccctaccagcaagcatagcagctttggctagaggctcttggaaaattatattccttgttaaagaggttcttatatggatacttgtgcaattcactgtgtggtttggagtcttgccttctgttatggaccatgatttattctgtgtcttagtcaaggtttttgtggctgtgaagagacactataactatggcaactcgtataaaagaaaacatttagttggagctggcttacagttcagaggtttagtccattatcttcatggtgggaggcacgggaacatgcaggcagacatctgagagttctacatccagataggctggcaacaggaagagagagggtgacactgggtgtggcttgagcgtttgaaaccccaaagcccactagtgacatacttccttcaacaaggccacacctactctaacaaggccccacctcctaatagtgtcactccctatgaacctatgggcactatttttattaaacaccacactctgcttaatttttccttgaattatttccttggaatataatgacacagtgttcatgactgaaattatatctcggtagttagagatataatttctttcaggtgcctcctgatgtgtggcatagggacattcagtagcctgtagataatgtgtatatatttatttccatttagactaatttttctgaaaaagtaatatatgggaccagtttaaatttgctacactttaatagcaaattgacggttttttcatctgttaaacaactgtgttgaactttggcaattagtatgattaccatttcaaacctcacgtgcaaagtccatgtgagtttgaaaaattggcttgagaattaggaatgggatgtgatgagactttgtttacctaaggaaggatttaccatataaggagctatcaccacccttgatgttatcttaggcatttttttttcttatctctgcatatgaaatagcttgtgtatgatccagcagaaaccttagatcctgggacagccattatctgaacaccacccttctcatcctgtccaggggtacaagaccagttaggccagcccagaggcaactgtgtcattctaactcttcctcaataaaagagtagggctatgtcttagtctccacccttacagttctgcctatcactgccactcggactaccacaaaggtggggttccttacccttttcattgtatttctgtgattcactggctatttcccgagaccctaatgtctgcagtcccacgtcaggctctgtggtacctgttgttgtctcccagagcagttttcagggaccccaaggatatcatgatgcttctcaggattggagtttgggggaaaggagatagattgtgttgttttccttctccaaccccctcaacaagcttagcaattttttcctcttcaacgttaacaaaacaaaataaaacccaccaacctttttatttagaatgaagctgtaaaagtagcttcccagtctcccttctcttcttatatgtccacacacaagcacattcacacacatacacatgggtattttcagtagggagttacaaatgcattccttcagctcaaactcctataaatcctaagagccagggatgaagtagaactctttacatgtcaaaaatgagatcttgttgttttcttcccaacagctctaaataaataaacaagtaactccactatgcattcattaatgagggtattctacactataatcataagtgtaataatggaagtctggatatcaacattgacttggtgttgttatctaatattaaggttttacattctcggtgcttctgtggtctgggatcacctttaggtgttatgtgtcccaagtctcttcactctgttatattcttcagttttctcttctctagaagggtagaagccattaatgtagcacaatgcatttcaaattgggcaatgtctgcttctgatcagattcaagttttatggaaatgcttttggccacacagcgctgggtgcagatgcaccttcctctgcaccatctaggaaagcacaggatactctcttgttctgttgtagacattgactttaaccatatggttatggttatgggctctctccattaaaactcctgttttcactgggtttggacatgcctgataatcttagcactcaggaagctgatcatgattttgagggcagactttggtacatagtatgattctgccttaaaataagtaagtaaataaatatagcagtttttcctttcttaaacagtaagtacttaatagattttttgtaggaagacatgtaaagaacatatatatatatatatacatatatatatgtatattcatatacatatatgtctattttctgttgctataacaaaatacttgagaccaaataatatgaaaggatgtttactcaccatatgattttgaaggcaaaacaaacagcacagcatcatctctgtaaggattcctcatgattgtggtaccatattgatggcatgatggtgagagtgtacacaagagattttacattcaagacaagaagccaatgagtaggacaggcagactcttttaaaatagcattctcgtgggtcttactaacctctcccataaagcccttaccccttaaacattccattagtgaccaggcttccagttcatgcaagttttggaacaaaccacacccaagtcatagtactatgtaaatttccattcaaatttacactcttcattctgaggtggcatcataagagtgtagaatgaatattctggcatgccaatcacccctttaaagtctgtccgaacgcttggagtaccagagcagggttacatttgtggaactggactatgggaaatggctttatggatggcattggcaatgttagagtcatgttacttttaactactaccttctcaagaaagggaaaatagcaggttgaattgcaggggacacacacacacaccaaacagactggccttgtttgctttactaaattacatggctacttatgactttacttagagggttccaaagaaggaaagtgcaaagcagcaacctggtgagaataagccttgggattctaagaaagttgtgtggtcagccagggcacatgagccttgagagcaagaatagccttgattcccatacgttaacattatgctgtgattatcattttaaatgacagggatccagagacttctgaggggacagcactagtataatcataatacagcttgggcaggaagtgttggcacatggtacagcagtgggacagtaagtcttccattcttctctgtctgtgtgtgctcatgtgttatgcacacatgtttgaaggcatgcttaactctgcttgtgtatgtagaagccacaggccaatgtatcatgtcttcttctcttactttcttccttagtttttgagatagtatctcactgaacccagagattgcttgcttgcttgctttatttatttatttatatttatttatttatgactttacctacatgataccctaagccatcatcctttttttttttctttttgagtgattaacctttctccagagaaccaacctcttcttgaaacaataggctacccccactcccagagcttctttccttttaaatatttaatttttaaattacgtgtatgtgtgtatttgtgtgggagtctgtgcaggtgcccacagagtccagagacggtgttgcatatcctgacgttgatattataagtggttgtaagctaccttgcaggagtactaagagttcaattgggtcctctgcaagaggtgcaccaatacttaaatgtgcaaccacctcttcagcccctctgagggcttattaattaatctgtgtatacatctttgccagccacagttaaaatttctgaaaacctgcatacagatccctggtatctgtataaaaagcaagtgtagtgtctgtaagcccagtactggggtgggtagaaacagctgaatcctgaggctctctggccagcaagtctagtcaaaacagtgatctccgggttcaaggagcaactatctcaaaaaccaaggtagaccataatagaatacaggaggcacaatcttcaggacatgatgtggcagcacctcacttgtccttctgttgtccaggcacatgttgggggagggggcacaagtgagcaaggaaactatttttctattccttatcaagaaataggaaaattagatcacaaattttcaattagagaactagggcttattggattaaggaaaaaaaataactgccattaagttagctacccatactctatgtgtaactaattacatgagaacagctttctttcttcttattagatcttttcttgaaggttctggcctctctatcttttgtcttttctttttctagttcttttctcatctttggatctcttacaggttggtcttcatctgaatccaggacagacacagtctgaactatagactagggtgagaaggagctcttccttcttgagtcgtgcaacagggcctttcccatcacatgtatgtcccatggagaaactactctgaggatgttatgaaatcacaggcccttgctttcactcctatctctctcctgtgcaagactggcctagctcccactgctctcctaaagcttgactgtgataaccaattcacacgaaatacggcaaaatgcctacgtatttgaagagattgaatctgttagttttaatctgctgactttcatttctatgcattgcatctgcttttgccttcctgaatcatgctgagtggcacgtcagtggtgatgcaacagctctgtgagtctgtcaacctttagcttattctgctggagaagaaattgtctccaggtcagtgtggcccaggattgagctcaaggcttgaagtcataggcatactgccccgtttgctacatttgtacataaggcatttcctctgataagaactaggcactcaagccctgtctaacagtgaggggctggaagaagggaggcagaaagaaatgaaggctaaaccagtcaaagggacattcaagttcctttgtgttccagcttgctgcctttcctcctgatttgagtttcagatgtgtgctctccttttctttattttttctttctttatttttttgcctcaagattgacagctgctcctctctacacattatggaaaaatcgcacaaatcgacttggtgtctgtcaattcccattttaccatagatttattttataattccagaaactctttcactgtcagttcatcttaagtgacttatggaagccaccagcacactggttagctctgtcctcaacctgggaagaatcccccaatagaccaaatgcatgcaataaactgtccacatccttgatctatcaggggactttgtagataaataaaccttcgggaagaagtaagtacacccacacacctgagattagcctcataaactgcaatgttttgtttgtttgttttgtcagaaatgaatttttccctctgggctggtgcatcttaaacattagtcttaccctgagtttcagtgtatgtgtgtggtgtatgtgactgtgtgtgtggtgtgggggggtattgtgtaggctgtgtgggtgggatgtagtaagtggtatggggtgtgtgagtgtgtgtgtatgcccgcacgtgcatgtgggggtgggtgggtggtcagtgctccactttctattttaaatgtgataatgacataatagtttgactttcttctgtagactgattttataagtctcagaatgtcacctagatttgtgctcactcaactttggagtgatctgagatgtgctgaagttagtggctttggccttgagagtatggtgctgtcttgggacagggatctgaggctctgtgccgtttcaccgtctcctctcatcatcactgcaccagggaatgaaagtattaccaaacaccttaagaatgctcggagaagcagtgctggcttggatctgatgctgagcaaagaggatatgaatggtgtggtgggcaggaggacttggggaaacctcctttgcttgagacttttgctgtacccccatttaccagctgtgagatgtaattatgctaggaatccccgcctttagcttttggaggtatttctgagcctttgaaacagcacattgtcctgggaggagcatgtcagctgtattttgcaatgcctgatgcatttgtggcaagaaaatagccaggagtgcaagaaggacgtgaggaacgtggtgggtgccgagttcaccgtgttctccacctcccgctttcgctttctgtcttgctccctcccttcctgtcttgcttcctggtttcctagatgtctggacagacagacctcagagggtcaaattgtgcattttgtggctagttgatggggaagttgagctcacagccagaattcctgatagacaggaatgaattagaaaagatttctcagccatttggcaaggctgccaagtatttataaaagggtgctcagggatagagattttgtttgaaaggtcacaaatttgatgctcacaatgtgagtgcaggtaacaaggcatgagaaggcatggaaggaaatctttgggcagaattagtgccactctcgcattcgcaaaggagcaactgtgcagctgcggctgggtacactcaccgttgctgccagtccaaaagcacctgtaattctccctcaataacatttccctgcattaaatgtggacaaggcgctcaaaattattaaatatttctgtgagccaaagaaagctggttggagggttgttccaatttgtgaccccctcagtttggctcctaggattcatgggaaaaagcagcatgaatgttggttcccagcattttttggtttgcttggttctgactctgctccacagtgggactgaaacatggtttccttcggtatcttaggacttaaattgaaattgcttgtaattctggagatcaaacccaggaccttgccaggctaaccaggtattcttgcactgagttgtgtttgcagaactgatgtcttctaggagtgtgtaaacagtcagcaggtcactcagggcgactcctctgtgtttcttccaatcttccactagctttatactaagacctcttagtaccctgggagaaagtcttaatagacatggagtggagagataactcaaagacataaagatgaaaagaaaaagaatgatggctgttaagaatatggcagatttgccaggcggtggtggcacatgcctttaatcccagcattcaggaggcagagacaggtgggtctttgtgagttcgagaccagcctggtgtgcaaatatccaggacagcctccaaagctatagagaaaccatgtctcaaaaaaccaaaaaaattaattaaataaataaataagtaaaaaggaaagaaaagaaaaaagaatatggcagattcagtaaagaaaggttgcacaatcagccatgtgaaggaaagttattaactgtaaaacgtgtttttttgatagttgataaaatacttctaagatattaaaacctcacgtgtttaaagcaagatctcactatagccctggctgagctggagagtcacaaaccatctttaaaatcccaaagcatcttaagaggtctaaaaacataggtatttgacgtaaaagatagaataataaaactttgacattttttgattggcattaaggaaagcattttgattgtgcctgttttgttgaaatcttattatgaaagcagaaaataagcaaataggggatgcatggatacaacacagaaaagcccaactaaaacccagagccaattcagttgtctggccatggagagaaaccactccaatcaggcatttattcacaatgtagtaagtgcttctgaattttgtttctgtgcacagatttctcaaaggtcagccaattcctacagtacaaaaagagataatatgacagggcaaaaagagtctttgaattttcattctatctttgaagggtgagctcttagcttttatcaaattctcatgtttgaagtgtcagcattgctcaagcatgtccttaagtccttgatagagtagaatagcatgagttgtacatgtaagaaaagacaaaaatgtaggttcaatccttacaacaaaatacgaaatgttgatatgtctgtacatatggataatgaatgatctataaaaacatttgcaaagtttgcaaataatatgcaaaagaatataagatatattctgatagaattaaaaatgacttgtttgtgtatgatcatagtgatatgtagaatatagttgaaaaagtaaataaaataacttttatcttctccacgctctgttttttctttaaaaaaaaccccacctttcacttgacaccatgtcccatcatttgctcctttttgagatttgtcatgcattctgtgactgtagtccttagcattcttctttctttaggattattctttctttcttcactaacaagatttctctagaagtttccatgagaagaacaaaggaaagagagacagcaaggaatgcctgctcaatttctggcttggcaaactagattagctaggatgtatgtcatttctaaggaaggaaaaggttggggtaatggcagtattagaatttcttgatgggtcttagtgttgatttgcttcctggccctcatgtaaactttggagagcctaaggtccaatcaccactattttctcttatctgtgtgctgagattgtcagttaactttaaataatatatttactgaacacatttattcaagtgattaataattataaaaagcctaaagtggaatgtacagaattgtacattttcatctaccaccatggcctataaactttttcctttctcacaattggtgccatgatcactgtagttaccaaagacaacaatagagcaatcattcttgagtgttttctgtactccctttttgaatcattcagtgacgtgctttgctgtgccagtacactttatcttggagctgtgactctgtgtaccttcctcctctgccctgacagcagcttgtttcatcccacaccatccttggcctggttcaccatcatcccctctgcttctgcatttgattgtcgacagccattctcagggaatcagctgccaaagatgtaactgtgattgagctttccagcgactttccattgaccttcaaataaaatcccatgccttaaaaatgatcttccaaagcagctatgacctggtttcttcctaatcttttaaattttctttgtgctcatcacattgaaacacaactttctatgtcactttatatctctcaatacgtaaaactttttcccttgttcaccatgcctgggtatcttctttggtttttacatagtatatgactcttcttcctcctctatcctggctccccttttgtttgtttgtttttgttgttgttgttctgtttttttttaattttgtttactgagatagtatctcactacatagccttagtggacctgtagctttctatgtagatcaagcttgccttgaattcagagagatccacattcctcctcctgagtactcgaattaaaggcatgtgtcaccacacctagatctaatacaaggtgtctcttgtagtccaggctggcctccttgaattccctatgcagaggggaatgatcttgaacacccaatctttttgtttctaccacccaagtgctgggattccaggcatatatcaccacacttaggttcgcattcttcatgttcaaagtatatgttacttcctttggatggttttcctcgtaaacattgctacagtagatccttaatttcattatctggcttcagcatgttaatgtcttttgtatacctgcctagatataaaactgtattgttgcattgttgcttgttcctggggtgtaaatgcaggggagacaggtgtcccttgtctcttattaactagaatattccaatgacctggaaccctgtgtgctatgtggaaacctttagtagaaggagtagataaaagagtgctattgtgttgtttgtaaaggaagataagtgatggaggcagtaggaaaattgggaactgtaattttctcttaaatcacctgtgatggcatacagggcactgtttcattttaagtgtgaacatacattcagtcattggagaaaccctggtagaaagggaaggaggcttggctagattctggatgtctgcattctgctctccagtttattaccaccttagaacagctattagcatgtcacttctcattggtcttacttcacttgtaaaatcgaggagcagatgaactatttcctaatgttcacgtcaaaccattaattaccaccttgagtgggtgtcatttgtgatttttctatcagtccacattgccattggatgtgcattgttcatattccctgttccacctcatttctgaacatcctccatctacttttctccatagttttagaatatttgttattatattcaattccatttgtagatatgcttgtctagaagatcgggtttcacatttagaatagagattagcctgtttagtttgaagatgaatatacactctagaggcaaactttacctatcagctctgccctttataaaagcagtgagcactatagcttgtcactgcactgatatgagagtatgctaatgaagcagtaattagcgttgtggctgatgttcctggaatcttgaggagcgaagtttagagtggtaaaacaccacactaatcttcattacttggtgcagaaacccaagctgataactaattcctggcttcttgtctgaacttcctgtagccaagttgagctctgtgtggcagagactaggtaaaacccagggtgcagcccattaccttgtatatcattcactttccaaaatggccaaggagaaagcaaagggacaaatggttggttgactctggatctgctctcttgttcccaggaggctttggagatagaagcacgcagtgtgttttttggaaaaatggaatgttttctaaaagtcaccaacaattaaacacatttttaaaggcatctgtctgtggaaattgcaagtttagaaatatgttagaaggtgatggtggagtcagtaaaggaactagaagagtccaaaataagatagaaacaagggaggatatggtagattgaaaattattagtggctatgttgattctctgatcagttcactggcaaagctaagcacgcatctttatccatgagttctgaagcccagtcagtcattctagggtaggaagctagactacatcctcaggccaaacccttaagtccccagataaatgacagcttttgttctagagataaagtattctagtaatgtcacttaggatgtggcatgcttttcagacgtactccttggactagtgggggtgaggagataatcctcaatccatctatcgtagccagggaaggatagggatggaatcttcttgagagattttttcaacattgggaaagccacagtgtcccaggaacaagagaacagacctagagtcaaccaaccatttgtccctttgctttttccttggccattttggaaagcttatgatgtacaaggccctgggctattccctggctgaagctagggcttcatctagtctcttcccacaccaagctcaccttgactacagaagttcaggtaggatgccagaaactagtcctcaatgtcagcctgcactcatacacaacactgccatgttgtgaagctacaactacaaagcaccaattgatgtacttttagaaagctttcatgtaaaataactccaggtttgtatctaccaaagaaaataacattctttttagttgggtctatctcaaatataatacaggacatacttctgctgaagtgtttgtcatttatcttaaattcaactttaactcagcaccttgcattattacttggtaactacagccacctcaatttacacctaaatcattttaagattaaaggtagggaaaatagaccaaatactgagaaacacagctgacaatactgactctccaaatctcagtatccatgacaacagtaagtcagtagatgtctcttattcctctctcaggaaatgtgccttgaaaacatcattactataaagaaacatgatggaataaccataattattttcccatgtattctatgatggggcctttggattggttttctgcttctattagtacccatagtacagcaatcaagtcccctccgacagtgacttctttctgttttgtttaggagaaataaaaactcattaagtactttgtaaaaccttttccacaaactattcttctgcacacttgactttttggtacgtgtgtgtgtgtgtgtgtgtgtgtgtgtgtgtgtgtgtgtgtgtgtggtttatgttggtggttgagagtttgctgtagttaacctgggagctgctgcaacaaggtcatttgaaatgaaagaatttatcagctttctcatcagccattacctttcagattacacgattggaagggaagcaaccattttaagatttgtagattttggaaagcacaaaagtaaccctgttgtcacacaatcctttcagaggaggatgttccaactccatagacctgaatcctaggtggcagttagcacaaactaaaacgatctgggtcaggagtctggcctggcatcaagccagtgattgctgcattgccctgagaagacaaagacacctatgaacacttgagtatggataacaagatgagtcactagtgcatagagttagctgttcttagtttcatgtctgtacctcttatggaacattgaattacataattggaaattaaagttagcaatacctttttcctagtagccagttttggtacttggatggtgagttaattcaatagtagagaaccacaggcatgctgagaaagtttactccagtaattttctccaataatcagtgggtcagcagagttcaggtttggggtcatatctgaatgagatccgtctatcagcatccctatagagaaaaatgcttctctagtgctgctctacaaagatgagtaccaagtctacacaggggaagaaataggcttttcaaagtacaccaaagctatcagtccatttcactagcatgcatgattatcagctgcagctcaacttctacttttacagttttccttttgatgcaagatttacattgttggaaattcacactccagtgcacagtcatttagagtttggacaaatatttgtcctaacaaatacagacattaaacgctcctttgggtcccttcctacttatttgtttttatacagacccggtctgaaatttttgtccactatttggtagtaaaatgtgaaagtgacttattttttaaaatggtttggttaatttgtttacaataaaacttacttggatatggttatcttgaaatttgatcactgctttcagttgtatgatggccaccacaatgaagacaaaatgatgtcccatttcctcagtattaacaatgaatatatgtttcctgtcaactttctttacccacacaactaagtgactctaatttgtgtttcatccctgtagttgatcattttttggaggatggatgaaggaaaccttactgtcaggagtcttttcagtctggtctcttgaatttgatgtagtgtctctgagattttatccaggagattgtatgtccaaagtctgttcttttttttttttcttgttttgttgagtagtggtgtgttatggatataccacagcttgacaatccattcacaagtttaaggacatgttttggtgattatgagtatagtacttataacctgaacatcattagttcttaaatgtgctattacatggatttgcaccatctaccttttgctgtttatttataaattctcagatctgttaccacatacaagtggtggctaggagaaataattctatcatttagagaaaactatgttactgtctctctcactatgaaatttgtagcttataaacaggttgataatctctattacatttatattttgacttgggagcctgaaaaatatcattaactgctttgatttcatcatctaaaatattttgatcatggaggatttttttccccaaactggactgagagcctacatttttcttttctttttatacatttaattatgtttctgtgttctattgtgggtatatggaggtcaaaggaaaacctgtgggagttgatttcctctttccatcatgttccttgggactgaaatcaggccatcagtcttggcagcaagtgcctttacccactaaactgtcttgctggcccaaagagcccacagttttcttccctaggtaagacaaatattttaactttctagtatcaccttagaagaaagtaagcatgatctttccttgtcctctaagtactaagatttgatgacaaggaagaaatacaatgcaattagaaaaaagagtaccaggctaggagacgatcgagaaacatcaaccatcaataaatatttcatggtgttgctatgtgtccaaggttacaacagatcaaattgcttagccataggtcttgttgatgcaagctttagttgaaaggcaggttagggtggctttcatcatcagattgtggttttgctttggctggagaaccaatgccaagtgcaaaaagcgatggccaggtgcctactgggcaaagatttgtctcttgtttcttgcatttttatagaagcagcactgtgttgcttttatttattctttttttttagctttgatgtaatttattttttctccttttttatttaaattaaaacaagattgttttacatgtcaattccagttccctctctctcccccctcccctaccccccagtaacaccctatctattccataccatttctgctccccagagagagtgagaccttccatgtgggggtttttggagtctgtcatatcctttgggatagggcctaggccttcccccatatgtctaggctgagggagtacccctttatgttaaatgggcccccaaagtccattcttgtgctagggatgagtactgatctacaagtcgggcactggtggcacacgcctttaattccagcactcggaaggcagaggcaggtggatctttgtgagttcgaagctagcctggtctactgaacgaattccaggacaggctccaaaacaacacagagaaaacttgtctcgaaaaaacaacaacaaaaaaggactgatctactaaaagagaccccatagatttccgaggccttctcactgacacccacattcatggggtctggatcagtcccatgctggttttccagtgatcagtctgggggccaagagctcccccttgttcaggttagctgtttctgtgggtttcaccagcctggtcttgactcctttgctcatcactcctccttctctgcaactggattccagttcagttcagtgtttagctgtgggtatctgcttctacttccatcagctgttggatgaaggctgtacgatggcatataagttagtcttcaatctcattatcagggaagggcatttaaggtagcctctctattgttgcttagatgattagttggtgtcatccttgtagacctctggacatttccctagtgcctgatttctctttaaacctatactggctccctctctgatggtatctcttattttgctctcctctattcttccccctacacaacattcctgctccctaatgtcctcctcaccgctcctcttctcccttctcattctcctagctctctctcccttccctccatgctcccaatttgctcagggtctcttgtccctttccccttcaccaggggaccttgtatctcttagagtcctccttgttgcctagctactctgatgctatggattgtagactggtaatcctttgctctttgtgtaaaatccttttacgagtgagtgcataccatgtttgtctttttgtggctgggttatctcactcaggatggtttcttcttgttccatctgtttgcctgcaaatttcaagattccattgtttttttgttttgttttgttttttgttttttgtttttttctgctgagtagtacaccattgtgtaactgaaccacattttctgtatccattcttcagttgaggggcatctaggttacttccaggttctggctattacaaataatgctgtgatgaacatagttgtccttgttgtatgaatgtgcctcttttgggtttatgcctaagaatggaatcgcttgatcttgtggtagtctgatttccattttcctgaggaatccccatactgatttccaaattttttacatgcatatacgccacacaccccctgtatgcatttgcctgttgtgtatatttctatccgggttgaaggtaatcacattgttctattcatttactctgttatccctcagaaagaggttaagtatttatcaagttcccatattcttgaacttgtaatccaaaataatcagaacttggtaaaagaaagaaatgtgggtgtgtggttttgtcacaagatgagtgaagaatggtgctccagttttactgtgtggtgtcaatgcagcaatgcagcttcgggccgtgaggaagctctcagagaaaatttacattgagaatttgcacaggaaggtattgtagtgataaatggacatggtggggcatctgaatgccccacgacatgttaatgttaatatatggtgttatatgtgcaattaaccagttcatagaaccatagaaagccaaacaagaaaatatgccaggcatttcctggtaaaaacaggctcgtttcttccctcatgcagaccctatgctcaccttcttagggcagcaccagggcagcatttttctttatagatatgctaatattcaccgatgatcgtgttgggttcttcagtctctttatcacctcaggagcatcaataatctatgtttgtgtttgtaaacttccacactgcatatgaatttacaagcacccaagttggtgaatgagtatcctgggagagagaggaagtgcattcttggagctctctcactcctactccctgcaccatggaaactgataaagagccgagaaagacacagaggtactttatccttgttatggtgatagcttggtacatagttattgagttacagtgctgtggcttctttcaagatcaaatttgctcataattgcaactgttacaatgacaatttattagactgaaaatgtgtgcctctccagaatgcgactctttatggagagaaatgagagtggctgtgtggctcaagtagctttagacctcacacacaggaaagaaatatgagcatgtttcatggagacctccaccagacaacctagtcagtacccagggagcatggcctgaagatctgtcttcttctttagcgctcgagcttctactgtgagtctaggtctgttcagtatgcttgtggtggaaaaggagcacaatgagacagcacgctgaagtcctctcatggtggcttcccacacatttctgaaacactgtttggatatcctttctgaatcttgaaatatttgtttctgtttgaagtctttaaaaagatctggagatgtttcaggtcttcactaaacatatactttatcataatgaaagacaccatggttcatagatactaggcatataatttgaagagaaggctagtatttatcagtcatctactgtatatatatattctaggcatgggttgtcattcataaacattgtgtaacctagaacactcatagcgttttgaaaagcccttctttagaagaaggtggagtcgtggaagctaatgacttagccaggggcttggtattgttcctacagtaggctactgttcacatttgttttgcttctttctaacaaacaataaaaggcagcgataaaggaagatgactgacaggcctatggacagtggtcttttgttcttccctggatgctctatggttgctgtcatcatgaatgatacaatcactttctatccatccctcccctccataatacacatttatgatcaacaggctacttcagagcaaacaaatggtcactggtgacattgggaagacaacagtaccaaaaaacagaaatgtgacaaacaaaaatagccaaaacatgcaagactgtaccagattcatctataagataccagctttgtatctggattcagaacctgctcagtgatagcaaaacaactgcccatggttcatgatttcttgggttaaacaaagaaaaatgagaccaaacaaagccttgcaaggcatggccagtgtatggggaacccccaagaaacagtggaaagaaagcaaaaacagaatgaaaaagatgctggtgtaggcaagaaacaaatagcttaaaacatgtaaactttagttttatattgtggcataattcagttaagtgacagctgattggagatgggcattagcaccgtcactgcagtgagattgaaatgctgagtgcttcttggtggcttgttggccaagccctgttgatagtgcttttgatataccaatccagtgtatcatggccttttctctcactcttgctcctgaaggagagacatttcctataaactgactattttcatttgaacttaaagtaatgccgaggaaaaatttattgttaggcccttttgagttttactgagtccccatccccactccaagtagctctagtcttagtgagaaaggaaaaccaacattccatgcatttcaaactcttggccactgtaacaagtaggatctgttattactcttctcaatgtgtggatgggtaaacaaaggccctaagaagaaaggtaacttactcaaggcatagttgattggtaactaaattttccagaatgttctcttttgaccactgtactgtattggctccaactttttagttattcttgtaattgcctgcatgcatgttttacattcaaatagccccctttgatagcaatatgagtgaggatgtatgagtggccctgtttatcacttcctggttaatagacattcggattttggccccacagtgtcctttataattctcagtctgagcacgtacactgcctcagcctttgcttaacctgcaggatattatcggacttaatcctcctgataacctgtggagtaggtaagtgttattaccttcattttatagataaaccaaggaggtgctggaaggttaggtaatccagccaggccatagggcagctaaacctgtggctagagaggcaggcagtcctgattggttatattccaaagcccaagcaagccccttgtcacctcccagatagtctcccatagcaacctctgctgatttcaaacgtttcatcacacatcattcatgtatttctttgaaatatttcaagattcaaggaccgaacagaatgtcttaagctcaccttcttggaaaaccaagaggtttctgaaagaattactgtatgatttaagacaggaactttgtagaaacatgtcactgaagatcaattaaaaaggaaggcgaacatttccaaaatcaatcctggctcttctgaatgatctgtcttttgcagaaaccctcttccaggtgtccctgccttctgttctcatcccttccagctctcatccttgtcactttcaaactaatgcatgaaggctccattcccaagttctgaaagacaaagtatcatcatatctgctcctaatatttgtaatttggggaaatcaaagctgcaggggtaaaatatcaaggatgacactttaggcccgaggtggggaaactctcagggtgcctttaggagctccagcctcagccatggaccaacccattggccagcttctcaggccccaagtcagatgatccagtcttcctatcaaggttattgataatacccgcctactgtgtgaagctcaccaccttgatactgtgccttgtgacacagatgaatctggatttggtgttgacagagggattggtagcagccagtgagtaggatggcttctgctcttggctctttgggatgactgtgtgggtggtcctacgtaccttagtttctccatctgttttagtggaaaggaccataacattctcagagatcacagaatggaatgtgctgtgtaaacaccaggcactgttgttacaataaatagcaaattagtgactctagcttcagtttcctgcacttgatgacttgtgtgttgatctcccagagactcagaaattgtctctgggaaaacaacaacaacaacatgttttctaacagaaacggaattttaggatttgagttgtatctgctggagtacatactcctgcctctctttggaaagctgacattgtgaccacagatggagctgacgttcttcttaggttgctccttagcatctgcctcaagggatctaaattgtctcacttcttgttttctaatttttgttgttataaatatgtactttccaactttaaagcattccattggaatctattgcagtgttattggccttttctgcttagcaagaaatggagaaatgtgaaggttttagtagtgtggttcctaatagggacaatcaaacaggtgtagagtgcattgcttttcagagcatgggcagcagaactctttttgttctagccatttccattttgataggttccgtttccatttagtggtccaccaaagcgttcaggagtggctaagtctgtccccccctcacacagagcacggcttgcaaatcaaaacaagaggcaatggctttaagcccccatgctcgcatctcaggcctgcctcacttagtgtccagtcagtaacatccactgtgtctgtctagctgtgattttgtcaagcagtcaaatgagatgaaaactactttataaatacaaaacaattgggcaaaaatcagtgtcttagtaatattgagactcctgttctaaagtatggaaaatgacagcttacaaatgataactggcagacagctaacctcctgaaacaggcctgggatgaactcagcctttgacccactccttgcagcatgctggacctgacctctggcagcttctgacccagttggaatggagttcaggggtagagcgggtttattggaacacttcactctgtatactgaacagtgattgacccatcccacccaactgtaagcaacagacggaaggaattctgttttctgagtatcagagaacatccattggctacagcttagagacagcctggttcaaaggaaggacatgaaccttgaaggccaaaacatgcattcaggacacaggcgtctgctgagggaagagtcatggcatcgaggccctcagggcttcttgcttctgtatgtaacactgttttgaagatcaagcaggataatgcatgtggaactttttcctaggacattcctggcctttcatttagatttagaataactaattcacattctctctctgtgtctctccgtctctctccctatctctcctcactctctctccctactttcattcatattatcttctctctctctctttctctctgtctctctcctctctctctttctctctctgtccttcagtgaacaattaggcagatggtttcaactcctcgaacaaaagttttcttctataacaaatgaaaatgacagtagttaagaagtagtaggtagtagtatgaaggttacaaaggttagcttttgctaaaagatgattataaacttgaaagctgtattcattcattcattcattctttcattttaccagttaaccttcagtatttactttggaatctagcaggggactggtgttacaggtcacatagacaggaaattgatgatttgggcatgctgtttctctacatgaaaaaagtgatcccacaacatggagggcacactgagaatgagcgtaggtgagagcagtatatttgtagaatataagatgctgcagaggcaaggaaactgttgggtaattcctaaggagcagaagtttgccaataggtaagacaggagacgtgaaacaatgacattggaagaagactggaaaaagttcagatgtaacagaatgtcactgccatggccacatgtcattatgaaatttaggtgtgtgtatatggggtgaaggtagaaggaacaggctgatagggtagctaccctcagaatcatatcataaaatgttgcttagttcatgctcatgggtttttacctcatcatgtttgtttagggcattatatgatacaggatatcttgtgttagaagagcttgtcactgaaccttcgtgagctatacatgggatttagtgcttcttctccagaataactcaacttcttgcctagttagtacccgtgtccagtaatacatatcccattgtggctgggcacacagaactctgcagctgtggcagaaacacattcccaggtgaagcttagtatcctagtagggatttttgttaagacaagctatagctatatggaacgaagaacctcagttgagaaaatatctccattcctattaactgtaggcaagtctgtagggccttttcttagatactgattaatgcgggagggccctgcccactgtgagcagtgccattctttggcagatggtactagggtgtataagaaagcaaaccaaacaagccagtgggcagtatttcccactcctccccgacctccctgcctccaggttcctattgtgacttcccttcatgatggatttcttataagctttatgatgaaataaaccctttgcttcccaagttgctcttggtcatggtgtttattagagcaatagaaacacaactaagatacttagcagtactcctgggagtcagcttcaattggtcttgtgtcagattggtcagctgaaaagattgtttgttgggagctgtccataagttggacacagcattgtactgcatgcaatgaagaactggagatgagaaggggatggagaaaggcaatgttatttgcctgttcagtgggtctgtagttctaagtgcttcacttgaactgactcatttaaacagaataaagccctgtggggtagatattgtaatccctagcttctaaatagttcagaaagatttcagttcatgctgtaatctcactcctgctctttgagggagatgtatttaccactctctgtatgtaaggcagacttgggcagtgatggaggttgagaaaataatgttgagccagggtcccctttcagctataaaataaaaataaaacagaaatccgtctttctttacctacatttcttcaatcataggtcaggagaatcaatcagcacaatcttggcattttaacaagctggggaattgaagaggaaatgaaagactggggggaattagattagtctgaaacaccagaggtcagggcagccaatagtggagagacttctgactgagtgcaaaatctgaagctccgtgggcagttaatccttgaaaggaagtggggtgggggaagcaattgagggaaactgtcagagaaggaaactaattttaataatcagggaaacagaaggaacatagttgtgaggaaaagggcatgagtaataaaaggaccagaggagactctgaaagtccagaaattacaaattaaatcttggtattcaggccagtttatgttttttatttgtcacaagactggttttgtttattatttattatttcatatatatatatatatatatatatatatatggaagccagtgttgagcactagccatcctgggcctcccatcattttctgttcactccctcaaggcagtgacctgattgcctgctaggagcacagttctaccataaattataatattcctgaacaggtgagcagggaacaaaagctttagtttgagtcccattcaaattgaggacatctggtcaaccttatctctgctgaataaagatctgtccatcatcaagttcatgactgtcctatgagggcaatggagataaatgtgcagtcacagagaatggaaagtggagaggactcaaatggcatcagcaacaaacaaaagaaccaaatgccccccaccccctgattccaccaggtatttcagctattagactgaattgagccctggtcattgatctgaggctgatggccaggtctcctttctgtatttagtaaccttttacagcctcatctgggcactctccatgaggaaaacacaggattccagtgcttcagagaagtgattaaagcaccagagaaagtccaagaaatttaaggcaatttaatcagtcagtaccaccatttctctacaattacattatgaaatatttgataatttaaattcattttctcaactaatcaatcagactgaattctcaaggacagcagccactcatcacatggagccattacatacttggtatacagctagtgcatctgaagaaaactggaattttcattttagttactgtcattgcctttccattttaaaactgactcgatcattattaggaaatgcttaagctcccctgatacagttagacatgtgaatctactctttcaatgtctcatgaaatctaaattcagagaaaatatttccaatggaaatttggcatccaaatcaagatatgctgcaaatgtaaaatgtatgtctaagtttgacaacttcctaccaaatctcattaataagtcctatgttgcttacatattaaggtgattatattttggatatagtgaattaactaaaggataatactagtcctctaatttgcatttttctatatatgtgattactagcaaagttaaaatggcacatggattactttctcttcatgttcaatagcacagattcagtaattaattatctagtgtccccacaacttcacttcctgaattggtgtctgtaaggtggctgccctcctgggggtataataggctttcagtagagggataaaaaataggcataaataatctgcattttgctaatttgtagtgagcaattatatggggtgctacatgagtaattgggggtgtgagaatatagctagagtgtccaagaagactcactggatgtggctgacctgactgtatagaaacagatggttgggaggcatgatgcaagggttctctgtcaaagaggctttttagaattaatatatccttaaagggtaggtatgcagtgtttctttggctcattcatagaggcttcttcagctaccaggtcaaaatgataggaataagttacttggcttgagactaggcattttgacttagaagtgtcgatccatctgggcaggagggctgggcaatcaacgagcaaatggtgtgaaagcccattggcaggttcataaccctggagccagctggatgttgagggtgggaatgtgacagggtggttcttatagaagaattaaagcactttccttttgacagctggtgtgcagtagaatgtataatgtagcttttaaattatggttttctgttgtggccatcttcaccatgctgtgaacttagaaatggtcatggtgcatttggtatagataatgttatttgcccattgagctctcagtggagacttgacagttagccagcaaccagagtttgggatgagatcacataatttggcccatctgtaggtagtggctaaatcagcaggtctcaaggaactggtaagacattacacctgaatggctggcaagagctgaaatggcaatagcagacatgataggtggcagccgagtcccaatgggcttcccacatgtccagaactcatcctgtcttgcttcatcagagctggcgtgtgtgatggttagtcacatgggctctgaagtcaagtcttgtctgaattcagccttgccaattactagctgtgggaacatgggcagaaaacttcaatcgttgtgagtccagtttcctctttcataatgatgtcatttacatgatgccaaccaaagtcctgggacttttatggggattaaagtactcaataaattgtagctattattgttgttggcattgtactcactattgcttttactttcttagtatgtaaaattaaagttagatgaccagagtaggctcagaggttagtgtttggggatgctttatcccacacagccaagtgggatggtctactaacataccactcaagggaaaaatagcataatcttggctttcagacagcagactttggcaaacccatgaaaatcacagctttcctctaaaattattctcaaatttccaattctaacaatttacggtgaaaaatctaaggagcctttgtgtttaaaataagcaacttggaaaaaggagaaacccagagacatcatcacctgagtcattttgttgacggtgtctgccacatacagcgtcacgacattcagtttttcttggttcttggccagcataaggacttatagactgcatgccaggcagatgctggggctagtgtaagaacagttgttgaattcaattttgttttttgttaaagagtgtgtgtgtgtgtgtgtgtgtgtgtgtgtgtgtgtgtaagaaacattcttaattaggagtggatttacatcatattctacacatctttatgattatatctgttaacatttatgaatctggaaaatggaagtattattgaactgctttctctgttgagaggattaaagactgcagagatagagtacttatagcccactgtggttctttgtgaacaaatccagtggtactggaagccactgtgtttccctgccttgtgacagcatgtctagttgcatatgtgggcttagaatggacctgtcttagatatcagaaaagtctaacctaacatccatactcaactggtgaaagtcctttacccaacattcaagcagtatgggttcaaagaattccttttattgtagtgctttttctcttactaagttttcccttcctgttcaagacagtgaatatttacatttcctgatgagtgtagttgagaactttgagaatgttcctagaacttcctaatattatcccactgtattcaaataaattaaatacaccttgagataaaatgcagtgagttaacacagaggaaaaaatgccagcaatgtagtgatgtatagtatgccaggcacatctcaccagggctacatctcttcatgaagcccagaaggggtgctcagcacctggtaggatttgtccatgatatttgatggttactgagtgcatgcatatttatgacataaatatggaataatgccccaaaatgccattgaatgactaacatcaatagaatttcagcttgatgagtaccaatgataatgtatggttcatttcaacttcacagactaatcatgtgttcactttgcatctgtcagttacaggcaataagaccatttccttatggcccatataaaaatcaacagttcattgtcacaatttaggaaaagagagcttattttatataatatttaagatgtcttttcttgcctatgttcatgggattgcttaagtgttagactgaaatggtagtaaaatacagagtcaaaacctctggaaaggcatagaggtttcctttcatacacatattattacatagtcacctggtctctagcacctcatttgaagacaaaaggtgggccttagatagtcattaatattcctacctaaagagcaaagactctactgtagaatacaaaaggttgccagctggagtcctgacagatcattgctaaagtgctatgttagccaggagtctccagagaaacaggtcctgtccccatatatgtataagaattgagataatgaataaggaactggcaccttgattggggaagccacaaagtctcataacctgccttttcctgggtggagactcaggatgactggaggtctaatccctgcccaaatgtctgagaagactgggatctccagctctgagggaaggaggaataagttatctttcctcttggctttttttgtctttctaaggccattaaggtgttaaatggtacccacacacttgggagcggggtgggtatcctttttatggagtccatagattcaaatgctagtatgcagaaatgccctcatggtggcagctgggggtattagtgtagatacccttagcctagtcaggttgacacacagaatcagccacaataaacgcttatggatggatcttttagtgcagttatgtgtccctttcttaagtttacgaagcaaaaaataatgaatgaagaaatctagctttttgttggagacatggtttcactatgcagtccaggttggcttggaactcaagctgatttttatgcctcagccttccaagttcttggattacagatgcattcttccactcctggccttgtttttttcctaatttcatttgctgatgccagaacaagaaaagattattcaggggaagccatatctcaaactctgcaacttgaggtccactggcatcagtgtgtttatatttaggaaaaagtctgtgacattataactgccacagtttttccccctcaatagtaatttttagagagctaattgcagataggctatttattggttacattgtcaggggagagaacagttcaccatttcaacttcatgaggttgttcttttgcaagatccttcttactgctatagaggcaagcattttctttagtggttatacagatttcaaccatttaattgctacaggccctatacatgttctgactctcgtgtgtgtgtgtgtgtgtgtgtgtgtgtgtgtgtgtgtgtgtgtgtgtgtgtgtatgtgtgtgtgtgtgtgtgtgtgtgtgttccatagaagccattcatccattcctgagatttgatatcttcctggtgatatgaagcatgacactttttgttcatgctgggagaggttgaatggagccacagcctacagtcagtcacagggtcctgaggggaagacagatgctccagtgtgcatagcattgctgacctatgtgtctacaatggtcagtagatggggcacaggctatggatttttcacttaagaaatcttcattatgtgatgccttgatggagataatcccctattaactgaggtacatcttcatgcaataagcacctattgtgtgcccagtactttgtgtctcagagcatgtgtgactgtggcctcctagaattaaattaggaaccatcacatttctccattcattgccgcaggctccagctgaaaactagtgctgcctttgcatggctttaatcctcttgctgtgaccaatacatgagcttggtctgtggagagccttgttagtcttactgccagtataggtgacattttttccatgacactcagaaacaaccacgatacactgtagtccttttggatgagggctgtcatcacattttctgtatggtagagcaacttcactcaattcagtgtactggcaagaatatgttatagcttctagaaggtttcctggtaaagagtttatgagcaaagagcagcccaggactgtcccctgttgccacaactccataagtacctccctggcagaaatcagcactttagttaaagacaactggccaaattgtcttcctagctctaggaagccataaatatgtcagtacaataccattattagagtagtgcctgggctaacagggctccataagtgggtattgaatcaggttggtctgaagacttaggaaggaactactgtattacacatgtcctgtgaacagttggtctcagaaactgggacagctgatataaggtcttgaatgaaagcctaactatattacaatattttttcatgtataaactggtaaatccattcatttagcaaatacggtatgcatctgttagtatctaggtcagtggttctctacctgtgggttgtgacccctttgggagttgcatatcaggtatttatattataattcataactgtagcaaaattactgtgatgaagtagcaaaaaaattaatttatggttggggatcactacagcaagaggaactgtattaaagattgcagcattaggaaccactggtctaggttgtctatcacataccagagacagatataataacatagctcctttcttctcagggtgcatgcttcaggaataaccaggacaggtaaaaaatggtcaaagtgctcttagtgatggatgtagtcgaaattagcacagggtggtcaggaagccccttcaatagaaaaatgctaggataaaatgggttcctgtggctttaattaggaaaaggaaataaggaagaatcaaacattgtggaaatacagctcaaggcttactaaaggtgttagcaagcaggttataacaaaatgcatccaagttagggttatggttttgggaatgctgaaaaggaatctggtcaggtctgtctcccaggcttctcaattccccaacagttgtcaggaccattagataaatgtcgtggagtcactttgcagtcttattatttaattatttacattatcacagacatcattatgtacatgatatgaccttggtagtctccaagatacatgtgttctttgggatctctcttcagactgtctggcaatacattcctatggagggtcaccatggccttcccatacgtgagtgcaaaattaataccactccttattctatacttactgctgaatattctgcaagaaggaaaaaactaggaagcttattttcacaaaaaacaaatgtgaaaattaacacgattactttgtcatgtgtatattatagtatatatctatgtatgtatatacatactcatgtgtatgtggaagtgtggaagtgagcatggtgtgacacgtgtggaactcagaggacagccttgtctaggtagggtcctttgttcattgctgtatatgccaggctagctggctggcaatctttaggggatttttgtgcctcggcccccatgtctctgtacaagcactaggaatacagatgtatgccagtgcatcgaaccttatgccagttctagggttacaaactccagtccatagacttgcatggtaactgctttatcactaaactacttcccgacctctccattcccctatgtgttttttttttctttttctcttttctttctttgagacaggatctcacgtgtagccctggctgacctggaaatttatgtagtccagtctgagagccacatatcttttcctcctgacttcttggattaaaggtgtgagcttctctctggctacttctgagttttttaataatctagacaccagttcccagagaataatgtatattgtcttacgagtaacccagtgacctaaaagtgccaaagatctgacagaacttttctaaccacatggggtggcagagctttgagactatgttcgtttgcagcagagtgcatcctccaggagatggctcactttgtcaagtggagagaagtgatctgcaatgatgattggcactactcatattacctcacttgcgaggctccacccctaaacttcagaagtagtgaggctggataatacaggtctcctgatttctggcttctttataaaaccagcttcattgtcataccctggtcaaccaagtatcagctcaagtctgtatctcttgttttagttaaagatgtgagcttcgtggttggcatagcctggcacacagtacttcaccatgctttcctggtagctattgctgtgccagaaagtgcgcttagtattaggtgggaatcagctggattggtcttcacagtcagttgtcttgctcattttatgtatagagattgggtaacttgtatgaggtcataggctctccagaagttgaacaagatttctcagcacaggtttttggactctagaacctaattcacatggtctgtgtctgtcacgtctgtctttgtctcatcttgttgattctgcctaggtcacagcagctgggtaactaagcatttttgttctaaggggttttgttttgttttatttttattttggaaaatcttcaggccttgaactttatgtgctcttaaattacaagttagaaaatgtccttgagggagaaaggattcctgtcaccactgccaagtctgtgcctacggatccctttgtctgtgtcatgtttttattctttactcatcagataaattctttgtagtttgcacactaagtaagtctcttaacccatttgaaaatgcttacagctgagtgatagaggacactcttgcctggatgataaaagctcaagcataagctattctctgctattttttccccatttttcctcatccattgccagtaatatctctagtaaaatgcttgtcaacactaactagtccatctgggggaaatcaagtatccctcatctcctccatcagctgagaatagcatttcagatggggccacttttctatggataataacctgggcatggaattgctttgttgggttctagtttcaggtcattaccccagcgtatgacctgaccaagccacttaactgtgctgttcctcagtctctccacagtacaggaaggttcttttgagagtgtttaatgatgttagtaagataatgggttgaaagatttcattttgaaaaaaagtgcacacacgcaaaaatcaaatagctgtatttgtgatccttttatgactagtaatttctttatcactggaagccagagtacctggaaaactgatttaaaaaaatagtgactttttaattagtgactatgtatttattcatgccttggctctgtaacaaccattcacaaactcaaatcccaatgctctttatggcatggggttattttctcttgtctttcaagagtctggaaagtatgtttgatttttttgctttctttccatggattgtttaagggcctgaaaaagactgatctaccagttcctttactaaaaagtcatgaataaataaatgcatttattctctaaatcactttggggtacatactctaggcaagccgcagcaagcttctgtagggactggtaaaactcagggacactgtcctcacctgctggattgcctgattctaaacagagcccctatttcttgccagtagttgcatcttcatcctttactgtactcaagtctccacgagctgctaagtattacactgaatgaaatccctaggaagatgccttttgcaggtgctagaattttgacagtcccttctcatgtcttcaagactcaatagtgtttctcggaattctgaccaaggtcatctctcactccagtgccaacgatctgaatgtgccagggtggagttccttagagggatagagggctgaggatggagagaattggtgacagctctccacactccctcacccaactctgaacctccatttacagtacaatagacttcaggatcaggcatccaaagcatatggcatgaaagaaggaagcattgtggtggaaatgtgtggcttgtggattttctaacaagaaaattttcatgtggatgatgggtgaaaaagtgttttccctcttcatccccagccccatcattcctgtcattgctggtgctacagtcatgatttcagggaaaagaagccccagtaaaatggcttggcattcttctagagcactcaggaataccatggagcttggaaaccaggctcagcctgccttcccttcccctagtgtgagttccagcatggactggcattggtcaggtcctcttccagggctttctgtgccatgacctgcaagtcatttcaggcatcaccttgctggaaaccctggatatagttcctcatgtgaaggaatcttatttagattaagaaaacatttgctttgcctctggcaactgggtatacaggagacagtgtcaatcccttcactgtttgcccaaggattttgaagtgtttttctctgagtgtgaaaggcatgtttcactatgaccttaaccaaaattaactgtttgttgactactccagagggtggtcctggtgttcaaggctgtcacagtcccaggatttttggttgcaaaataccccagctcttctaccaagtgtaaggctagagtctagtaaaaacagaattataatggatgtcctcatcagagacctgtaccaaccctcatctctctcatccctctgctgatggggggacacatagagagtgttgctcagtgtgtccacctccagtgatcacagcaattacttactgatgaactttgaactctttgtccttgaggaagcatggtacacattctgcctaaaatctgtgagtttgctgtcttctaaaaccaagagaaaaaggcattggtttttcccaactgcatttgattcatagaatagagtcagcaaagcaatggttggttttaatttttttctcatattgttatccacagtattctttgctaaaaggtccaataggctgaacaatatattttattttatttttattttttattattttaattttattttaattagaaagaagattactttacatgtcaatcccaggtccctctccctccactccttccttgtcccccccaactaacaccctacctatcccgtaccctttctgctcccagggacggtgaggtcttccatagggggtcttaagagtctgtcatatcctttaggatagggcttaggcccacccccttatgtctaggctcagggagtatccctccatgtgggatgggctcccaaagtccattcctatgctagggataagtactgatccactacaagggtccccatagatttctgaggtctcctcactgacacccagattcagggggtctggatcattcgcatgctggtttcccagcaatcagtctgggaatcaagagctctcccttgtttaagtcagttgtttctgtgggtttcaccagcctggtatgaacctctttgctcatcagtcctccttttctgcaactggatttcagttcagttcaaggtttagctgtgggtgtctgcttctacttccaccagctgctggatgaaggctataggatggcatataagttagtcatcaatgtcattatcagggagggcatttaaggtagcctctcttctgttgcttagattgttagttggtgtcatctttgtagctctccagacaattccctagtgcctgatttctctttaagcctataatgtcttaagatttccaatgctaatgaagattaaacaactgaagccaccaggccagttgaaatgcctcattaaaagaacaaaacagatataagtaaaactttagatccccaattctgaacttaaaccattcttcaccattgaaccttcctccattaataagattacagcagtaggacctatgggacttagaaacaaaagccattgccatttatatttaaataactgggaaaataagatgatatgcacaatggagttgaattatacacaagggatgagtgtttctttctgtatgaatagttctttcctgatcattgcttatgtggactaaatgttatgttatgtggagaagagagatgctgacatattttcccacatttaacagatcactctatgctctttgctttgagaaattaggagaatgactactcttttctttgccaacatttgcctctttttctattaatctcagttgaactgaacaatttcctctctctgtgcaaaataaggctagtctttgtattcatttggttggcatacagcttgagggcgtccagtttttcaaatacagatctgagaatatctggaatgatttatgcgcaaagttgcagggctggccaaagcgaaccaaagtccattaagctaaattaaagctttgtttaagggaaaaatgtcattcttgctgctatctaaaacttataccatagtaaagacagaatgagatttcccatatttactttaggtttgaatggacttattaacaacatcgtcttgcccttcaagtggcttaaggatgatcattctatgacaaacacatgtggaatgaagtcttgccactttattttttcaatgtgtggtaatcttggtctggaatgaagatggagagtgctataggctattctaattcagttcttgcattaagattttgtatttagtcaaaagtgaatttgaccctagatggcattcagataataaaattggttttaggcactttagaattccatatccttttaatacttgaacagtcaaaattgtgttcaaatttcttcttatttcttaagttaattgttctaaagtttaaaatagaagagtataaaatacacttagaaaacacaagaatctttggatatagctttgacattcaacaaatatttaatgagtttacatccccatcttttcttttgctcattccattgtgatagaatgtgagtcctaaacttggtgtgcatatctaaactcacacaaaggggtaaggggaaagaaggtgtgtgggagtccaaacacacttttctttttcttttttttctttctttgtccactggaaaaattggcatggctaggtcatgtgatggttagtattggttgtcatcttgactcatctgggaagaagggaatctcagtttcggaattacctatatcagattggcctgtgggtctgtatgtggggtattttctccacaggtgattgatgtgggaggggcccagctttctgtgggtggtaccaaccctgaccagactagactgggctgtacagaggtactgagcctttcgccaagaagcaagccagtaattgctcttgtgtggtctctgctgcagtttctgcctctggcttccttccttgagctcctgtcctagattgtaaatgtaagatgtgataaaccctttcttcccataatatcttttgtcctagtgtttatcacaacaacagaaagcaaactacacagataaccatgttttctgcaggacaatgaaaactgttccaaagaatgcagatacctgagtccaaaaaaaaaaaaatgttcagcttttaatgaattattcaagaagcttgaggagtgttaatatcaaagggaaagttaaccttaaatcatttgagatgattgttcccacaaagttgatgtcaggcaaagtaaatgtgtacaaatatgcacaggtatggtcttcctttcaaatcaagaagacttattacttacagatattattgctagtggccagcataggccatcttcatttaggtacttgaaatttaacattttattaaacttttatagttgtgatattagtattcaattaaatataaatatgtttaattaaacattaatatttgatgttaggatattaaaatttcagtgtttaaaatattccatgtttaagtgctaaagaaatatgcactaatttttcccatcagtttggtttgaagactaggattctgacaaatttcttgctcattatttcatttcatagtttctttcaaatttgagctttatttgctgtgaactttgattataggctcatcaatgaacaccaatgtgtcagcaacatcttttattagcctgtgagatggagcagcatgagattcactgcctctgttcaacccttgctcaagttcttgtctgaagggactgcttgtgcctgtggtgatatcttgtttctcgatctctgaatatcttttgcttttctgcatttatctgtattcactgtcttttatggcttctgaaatatagactgtgaggtgaaggcagtggcttcactgcaaatggtataaaaacctgtacaggagtgggtttcaacagatcagggatctgtatcccccaattaaccccacacatcctcttcccccttctccctttctgtgtgtttgagtgagggagtggtgtttagatatgcaaccaagttttagaactcactttttattacaatggaatatacaaaagaatagatggtgatgtaaattcattaaatacttgttgaatgtcaaaactatatccaaagattcttgtgttttctaagttgtgttttaaacattagaacaattaatttgcatggtgttcattgttaaccatgtgatcatccatgtgctgctatctaattagaatatgaaatggtccattactgtgtagtaattaagcctaggtttttggttccctctttgcactctttctgctaaaactttcctgctgttttgtttttattaactagaaaagtttagacatatataccaagaaacatggattaattcaatgtaaaaatatctgttaatgcacatctgtatttgagaacctaatgccaagcattacctttggcattatgggtactaacacacaccttctttctccaaaagcagcaaagagaccatgcaattaaaatgcaaactattaagtagtataggaacctgtgttcatatagcactttgttgttggactctcttgacaataataccattttacaaatgcaaatatagattataagaacttctgtgatttttttctcccccaaagtagccaaactagtggttggtggcaccccaggaagtgctgggctaatgcttcccctcagtttgctctgcactgcttatgtctggcatcgattagttaagttcagcagcactaattgtggccttatgttgctgggcttatgtaaagagtgcacagggcacacataggatacttagatgtagattccccgtggatgccattttctctcctcatggagctgcagaggtggaatttctgtcttcccatttctagtacaatgtccacatctgctatattgcttttatttctgtgccttgagttggagtgaatgaaagcccctttcaccattaaagttgctcatcctgcctaatgtcacagtagtacccctagatccattagaggatcccttgctgtggaccatagagaggacctggcttaagttttgttgtgacttcttgtccctgtcataagagaaagtggaattgtgggattgtgcttaccttgaacttgcatttcccttcaagaacttcttcctgcttctttggagttctgaactggttaaaaccacctatctggaaatgtgtttctatgatgtctatatcaccatcttcttttttatttatctgctagaggtcaaatacaataccagcaagccttgtgaggtggggtgcattatgtaggtatctgtggtgtatggatgagttataacaaagttacacaaatgaaccatcattctgatgtttttgctttacttagtcgcattgcccatgaacctttccttgagttctttatgcagtcggctccttgctatttaatattgcatataaatactgattttttccaagagacttttcctataatagtccctcctctataatcacttgttatttcctcatattatttgcttttgtatcatatagcagtttaaaaaatctatgctataatctctttatttcaccacactgtctgaactccactagaatgaaaactgcccaagcgcatggaattggtttgttcactgacattatgtcccatctaacacggtacctgccacaagcaggtgcgcagtgaatatttctgagggtaatggacaaaggcaaatgaaaagctttgaaaatggggaatacattctactgcttctgtgtggtgtaaccacttgtttttctctttcctatgtaagcagaaaagaggaaggagaaaataaacaaggaacaaactgaaaaattacatgtgtaggggagtgtaaggactagtgaagtaggctaagagtggggaaggatggcctgaatttctcacaatgatgctatgaatttttccattaaacccaatggagcaaaactgaattgaaacatacatttttaaaactttggctctcagaaaaggccaactaaatatataattttatggtagagtcaacttttcaagtgtggtttgtattgtctctgttgtactatttcaactgtacattcaatatttctttgcttatttatttatttttattcatatgggtgttttgcctgcatgtttatctgagtaccatgtgagtgcctggtgcccacagaggccaaaagagggcattggatctcctgtggccagacgggtgtgagctactatgtggctattggtaactgaacctgggtcctctggaggaacagtcagtgttcttatctctccagtcctatatgcaatatttatttcacaacttcctttaaaatgatctgtaaaatatcctaatattcatgaccaggtgtattttttttacataaacttttggtgtttacagttattaaataaactcaaatgcctgatccaagtagatcaggtgaaaattctccatcatataaaacataatatcttatttgcctacaagttgctctctgaaataggtggattgcaaaccattgttttactttctttaaaaagaatgacagcataattttagcatttaataactcatggataatttactgaaggaaaaataatcaaagaatagcctacctttttttgaatacattcttttttaaaatgtcttgacttggtaaaatgattcacttggtaaatctgatttctttgtttcccttttcctttctctttcttatttggggggtgggttgggaagggtaaggtaggttagggtggtgtgtggtgggtagggtggagatacagggcctcactgtatagtcctgactggcctggaactctctttgtagtgcagactgacctcaagctcacagagatccacctgccagtgcatcttgagtgctctgattaaaggcatatgcaactgtattgggctaattaccattttgtgaccagagtttcagaacattactgagatatttgagcttgggagctgtgtgttagcactgagatatcttcctgaagctttattttttcataggaaatggacggacggacacacatacacacacacatacacacacacacacacacacacacacacacacacacacacacacacacacacacacacacacacttattcttctaatcaagtcagccctatgcagtttggtttcaaattcagagaagaaaaaagggaaggcagcggcaaacatttgtattccctatcccccagttttgttagtgttgaccaaaaggcacaaatcatggaatcctctttattttctggaaactgtttcaatcaatcaaatcattaaaggcatgactgtttactgaccatttttctaaatgccacttttgcatctttatggaatgacaaaagatcgttttccaactgggacatcaaccacagcttgttgttgcttttaacaaaaattttatttcttgtcaactagagattaaggatgtgtggttagaatttcagaagaaggaaaaattggaccataaggcatgtttatctctctccctgcattttacccagagatcatatatgtagctgatagcaaatgtaataaactagtcaaaaactccattttatatgttattttttgcagtttccccttttctactggcatttagagtttaaatttactttgcatatttatgtgtataaatacagagtagagttcctcactggcatttctgtagaattgcctagttaccatccacagagctgcataaagatgcagtcacctgaccattgtatgggcttgactctttgcgatcctgacagtatcttctcaatcttcccatcatatatggaaaggggagatcacagtttagtctcaggttgcttttgtcttcatatgtcaccatatgtcactgtgtactcataatgaatcatctgttatagtgtgcatataaaggaacgttgatttatttagaaaacagtttctgagattcaagattgggcagcctgattggcctctggtaaggacagcctatggtgactcatgacaggagcccatgtgggaacagtcagtaatatctcaatcaggaagcggagaccaggatcccaccatcccttctgagagcacaaccccactcaaattctcactagatccacctggtaaaggctctacctcctcccacgcctgtcactagggagatggttcagtttcatgacaatatggagcacaaccatactaaaaccaaagcaataggaacaaagctcagtgcatctctgtgtatttaagaaatgcggtctatcttctgagggatagtttgccttttgtcctttatttcttatggaattgttaccttattgaatataggaacttcttgtatattagagagatggcctcttggtagaagctgtgaacctttattgttttatctttcacctttcccccttgacactttttgccacaacaaatttacattattttcttatagttaagattatatttttttctgaatcactttaaaagtttgtaatatgtgtcttccactgtaaaattacttttagctcattcatttcttactgtgcttaatattcttaaatttttgcattttttgccttttaacagttaaagggtttaacatttatccagatttgttatgaagcttcaaatttatttgtttgttgttgttcaagtactgtcgtatgttaagtagcttgtttttttcgtctggggtttagcatagcatctttagtccatgctgtcttactatgtatttgaggttagtttctttattctctgttgtacctgttttaatcattagctctactgtattttattactcaaagaacttatttcttcctcactgggggatacatttaaaaagtgatagtataatttgtttcctatttacatttaaacaatgacttctagtatattttcacattataaaatattattatattcttctgttagtgacaaattacaccttgaataggatcaataagttggcaaatttgaaattgagatacaagtttagctgagtttgtgggggcacatctataataactatctattaatgtggtttgcttggtaagtgggagcagaggatggagatgtccacttagtccacttagtctgcagagggaggtgaggtttgagtgagggtggggtgtcctgaatttacttcattctgtaatgcgtctgaaatggaacatgtcaggggaaagaaggccattctcttctaggctgggtagagttgtatgaaagtgttttctccttgtagtaagcttggcaagagataacatttatatgatgttctgagttctccttgaagaacttaaatatggatggatggatggatggatggatggatggatggatggatggatggatagatagatagataaatacctgtagcatttttaataaaagacccggagacagatactggggttcaagcttcaaactaaagatcagagaagcgaaacagccaactcagtagatcttagctctgcccagctgaaatggcaaacctggcttgatgaatcctcagaagcaaaagctctcagttcctatctcctcctccttatattcccttctctgcccagctatattgctcctgtctccaccttcctagtgctgggattaaaggcatgtgatctcaggtgctgagaccaccttgtgtgagctgtttcttttaggactgcatcaatttcatgtagtcagtgtaatcttgaactaacagagatctgtttgccttttaatcctgaatccctggattaaaagtgtgtaccaccactgcctagcttctaaaactaactagtgtggccggctttgcatcctgaaccctcaggcaagctttattaaatcataaataatatgtcaccaaagataacagtttaaaaagataaatgtgggctttttagtcataggaaactcctggttcaaggtgtgtgtgggggcttttcttattctataactaaaggcctgtgcagtaaagcgccaacgcaaattacatggtattagatgctacagagaaagagagagagagacagagagagaaagagagagagagagagagagagagagagagagagagagagagagagagaaagagaaagaggcatgtacacacacaatccaatgggcctttttaaaatacagcagccctgtgatcaagcagagtgacttatagtcagacacagatgtgctgtgacactgtctagccagtgtgccatgtagctaacactttgtttggtaaaattaaagatgaggtggtatttggtaagatgaactgtgtggtaagatgaactgtgttacagttcatctatgaaatggctaccatttagttttctctctcccacacacctgtcttgcctgtgacacatagagggaagccaggcatgttcttagagtggcattacttgccccacctcaataaagactcctttaatttctaatgtctacgagttttttagtgactagcagattatgtgatactctctggtatttgcacatacaccttggctgtttggaattgatgaaggttccagatgtttaaacatacctgaagactacttcgtcctagtgtatagatataagcccacttaaccttgtaggaatgatatacataagtagcaatttaagattaagtttgcaaatataagttgcattgtcaaactcatcataaatgttcccttgttgggcatcatgtgtagagataattatgtttttataaatctaaaataatgaaatactagctacatttctctgatcaaaaatgtctttcaaaactcaatatcattctcactcatcttcatattcccacaatagtgtctgccacttaatatttattgagtgagtaacatagtggaacttgattccttagaaatattgtttagaatcaagaagtgaaatatttcgtgtaagagataatgtgcacccatgtccactctggcttctccaccctgattgagaagggtgcctttgtgttcttcctcaactctgtagtcaagtaggcaagagagattttgaatcttcgtgtgggcagataagggattatggcaggaagctacatgatgtccttactcccaatttttactttatggaaacaaagatagatggctagataggaaatttcaaaatattgtgacaaagttagctgtcaaacaaaggaacattctgtggaaacttgaagaaatacatcaatgctaatcctgcatttgaaatgctctttttttgccataataacaacctgtttttaaaatattcttacattttatatgccataagattacagatgctgtgctaaactcaaagttgaagcaaaggacatggttaaattttaaggcttttctggaatgttgtggttttaaagtttgagttggcagggtgcccattgctcaagaacctgactctttagtctgtgccacaggtaaaagtagggcatacctttgttgattcacctagtagtactctcccaccatgctgtgtttttgcaaaactgtataaccctagccagggtggtagtatacacctgcaagtcctaggacttagaaggcagaagcaggattgctgcacattcaaggctgcccctgacaaggttctggccatccagacctacatagtgagatacttccttaaagaaaaacaacaacaaccaagtgatgccaaaacatttaagaatatgtttcatagtaggaagggtcacatgtgtccaaagcaactggttttgtttatgacagtttacttcaacaccactttaccacttccggtttgctttagctatactacaagagcagaatgaacccgcaaagcttgaaatatttagtattgaacttctgtaggagagactttgcaactcttactatcaatggaaatataccctaaacattatcactgtcaccttagaacaaattatcagtggcatgtttttgtaaaaagctaaaaaaactggcttggtgttgagctgaattattagtctataaaagactagaatgtctgtctctattgaaataaaagcaaactgtctttctagagaatcacatggacttggagattttaattgtcacaataacgtttgacttaacacgaccctgactgaaaatgggaaatgctgtagacggtcatttatgttatgggactgtgatggaagctgagcactcaccacatgtctctcttcttggaaggtggagtggatccaacagcaagtggtgaaaaaacggacgaagagggattatgacctcagccgtgcccaatctacttacttcaatgaccctaagtggccaagtatgtggtacatggtaagttcaccaaggagattcagctattaccatgttgtccagttttgtggacaacaaccctaaccctaaccctaaccctaaccctaaccctaaccctaaccctaaccctaaccctaaccctaaccctaaccctaaccctaaccctaaccctaaccccagtccaattttgtggtgtataaagaaaagctgttggtcctgagaggcacagaaacagtgacctgggacctgttccctcatcaaggctcactgatagagagtgcactgtcatattttctaagacagtctgactcggagctagaaaacttccctgaggtgtagacgcactaagacctatttgcaattgtattcatctctgataaacggctgctgtgccctgaaagggtttatttcatgaggcacactagaacatgcatatgattggaattactctgctggcaggtgtcacctgaaatgccatctaatgtgtatcaaacttttgaccagttcagggaagccagtgtaagcaagcatgtcagtaagggaaatccactaaaattgtagatggtgctagttcactttagcttgcatcctttggaaatgcacctctttagtcttaagtgttttttgctttatgattactgaaacatggcttggaagacattacacattcttcatcatgaattcatatgtcaccagtttgctctgtgagctgtaaaaaagctcttttttttgtttctctttcttgaaaatttttattgctaagtgttgccagggtgttttccactacactactttttataatccctgtctcgaattctccacatgtctccagctgatgaaaagacacacatccgcagaattttgcatcctttccacatattttcctggctcttggtctttcattcctgctggctggagagctccttgctctcctcctgcatggtgggtcaggactgtaccacagatgttgtgcccaggacagatttctctagagttctccctatgttctcttctggcatcgtgttcttaacctcacatgtctcggaagtgggggggcttcaccccagttgctcttaacagttacttctttgttgctctgataaaacaccatgaccaagagtgacttatggaagaaagtttattttgattcacaattccagagggaaagcccatgatggcagtaagcattaggcaaggttgcaggagtgggaagttgagagaccatacctcaacctcaaacaggaagcagagggtgaactggaagtggggtgaaactaagttttcaaaggccacccccagtggcatactccttccagcaaggctgtacctcctaaaggttccataacctcctgcaaacaacactgccagcctgagacctagtgttcaaatgcatgagcctatgggaaccatttttcaccgccacactggtggcatccttcaccaggcatgttgcattccagtcattaatgttgtgcacatatttgctctgctgtatttggggtgagctatgggagggttctccatttaggtcttggttcatatgtctacaagaactccagctgttacagtactggagatgcatgcttatttggaggcagaggaatgtggctgataggtccaccaagtctcattctcttggacatatctagagatggagggttgtagaaatagatagagccacagaagaattttccatgagagctctgtcctatgtaaagcaaaaaaggaaggagtcctgatgtgaacttcaaaggtactgggagtcaagaaatcattaagtagggtaatctgaggggacagtaacacatgacagcttgctagctcttatagaagtaatgaaccatgaagggggcactagaattagtattaacaggagctgtgtgcttttcctgaccagacaaaattgcaatttctaaatgaaatttacaaaacatatggaaaggacaagtgtagaatgaccaggtttgcacctgagcaggatggacccagaaatgcttcccagtcaacttggccaggtgaaagagagctgcatgcatgcctctctccttcttaaacccttgttatggtattctgaccatgcctgcttggtacctctaatcagggtttctccctacacacaagtgcctctatatggttgtttataaaaccagttgagggagaccttctttgccttgtctcacatttcttctcataggaaagagtcacatgtctctctggacaagagtaggataccacatgtcccttttcctctcactgtactagtgagacagaaaggacaccaggaaaaatgagggcttctgttctagcaccatggaccacctgaggtttttgttgttgttgatgttttttttttcttgtattttgtacatttcatctctctctgtctctctctctgtctctgtctctgtctctgtctctctctttctctctctctttctctctctctctctctctctctctctctctctctctctctgtgtgtgtgtgtgtgtgtgtgtgtgtgtgtgtgtgtgtgtgtgtgtgtgtgtgtgtgtgttttgaaagaaaactaatgggagtttgttttcttctgtcatataggtttctaacctgggttgggctatcaggcttggtaacaaataccttacctatggcctcctttttgacaaaggcctcttgctgactgaaggctgccatgcctgtcccccaaagctcccctgttttccactggattttctgagcctcacacaaggaaggttgagaggagagctcaatgtgctaagtacttttagtactcagtgtactaaaagcaatatactaagtaccccttgagtagttttctgatcttgtgtagataaatgtacgtaaatgtgacatatgctgtaagaaggaggagtgtaagatgcatgtctgagctcactcagcctgggagagctgagatgccacactggcaggctgatgcccagccttccgatgagcaaagaatcctacccccacctttgtgctactctctctctctctctgtctctctctctgtctcagataccagagacagataccaggagagatgctaaccctgcctatcatgaacttcacatatgttcacagagtcatgactgaagaaacaagactgagtgccattcagggtaaacatagtatcagaatactattaagtcatggtttttctcttgaggaaaaggacagaaaacagatggcagacctatgattagttttcaggaacactgtaaccaaatgagagccgggactcttatatctgcaaaactgtattcaaagcccaaggcttcccctagtatgctcatgattaaatcccataaactcttctccactacaacgtgagagcattttgctcatccgtgtgactcttccattgcttcctgacaggagaccccagagctgagttttcatgacaactattatctcactggttctgctggtcagaaatctgaacagagctgagtggtagtgtctatgctctattccactgctgtgtttggggtttcatttagatgactcaaaaattccacgagagtggaaggttctactctctaaggatttatgcatttgctggtgacaattggttcctctccagaagggcctcaccaaaaagctgattgggtgtcacatgacattgtggtcatctgggaagcatgattttccctctaaccttagaagccaacgagatttatctaatttgttgttagcattaagagtgagctgtgcttccacactgaagcagacttacctcgcaggtgtgcacaccagaggaggcatggctcattatgtgtttccagagatgaccaccaaagttccacaaaacattgcacaagaagctttgcacagtgcacaatacccagattacatcgtagttatcgttctttggcttctcaatcaaaaaattaacttatcttagctagatagtcgattcatatacctgtgtcactatattttgcaatcatctgtttccctgccatcaactttttatttgttgctttaataaacctttaagaaagtgaaagcctatggcaagtgagcattcttcctggtcatgttagagatataagctaaagcatccgttcatttctttcttccattcttcaagctcttgatccatgtagtccatgctatagtgtcagctggctacttggtgagtctccataagctcctacctccatccagatcattagcctgggcctattcttgtcattctatattggttataagagagtggagattaaaggcaaggagtgcctgaatgttcttttaatttatttaaaaacttggcccaagtccttccctgccttggatagtagtgtgcagagtcattctgtctagcttgaggcttggccgcttgtgtccagaagcatgagtttagagagttcatgctgggcatgatggttgtgaagtccctcctctaccctaacaaacctctcatgttcgcatcgaggagtcagaacgatcagtacagaaaaacaactcatttcctgttccatcaatctgtgcctttcttctgtcaggcatgtgaaatagactggctgtttagagacataggtcctgtgccccctaagatcaaggaaacagaaaaggacaagataagaacatatcagaacttgttgggcaactggcttctctgccaaagcttccctggggtcaggtgcatgcgtgcagccactggtcctcgggcagaggctgtagtgttgattgtagattgattcttctttgagaaacttgtcttcaccatcaccaggaagtgatgctttgcattttggtctgaagtgggcctcagtcagtggggtggttctaatgtgcatatgtggcaaaagttgaataaataactagttgcatgaatgaatgagcaaacctgctatctctctggagcagagaaaataattgcctgcatttaatgagttccccttgttatgccaagtctcttgctaactctcttatgtagtagattattgccagtgttccagtgagttaggcattattatcattgccactttatggatgaggacattaaagtataacagaagttgccgaaggtcacctcctgagcagaggtagagcccagtgttcagacccatctctgcacctgcagacctagggggtccagcttttctttgtatctgtgcttcatcaagtggcaggcacagaatcacctggagggcttcaaaccgattgctgttcatcctcttctgtttctcccacagcacagtcagggactttgcattccttaaaacgttgctactgatgtgatgctattgtgtaggagtctctttgaagatcctcctgttcagccttatcttgaacacaaggttataagagcatagcgtgttttgtctgccagtcattagatagaagaagaaggcttttaaacttctggggcattttaaagcacacctagtcagtttatatttgccttggtcccatctcttccaacagcattttctatttgggaagctgaaaaaaattaatatgaaaagataatttcatttaacctgaaattgaactgattgaaaatacctctggcttagcaatcctctcaagatgctccaaaaacgaaacttagtgggtaaaaaggctacaaagatttggcccagtgtagaattagttttaacttacccagctggtacagcgacccattttaacactgttaaggaaagtttagttttactatgaagacggtaaggttaaggaaaactctttatcaaatatttgggaacatcagctacataaataaaaaaaaaaactgaacatacagggagttcagtatcatatgcattttcatccatacacaagcttgaagaacctaaagtcccctatcctaattaacacccccttcatccttcagggtcatcattcatgatgaatttaatgcattgtgggagtttctctttgtgggaggattttgaaatcaccctaaacgacatatttctcctggaatgtaacgttactcaaggaaattgacaaaggattgaatgataattcttgtctaataactaaggaactaatgatgattttggagaaacccatagtaagtaacttttaaaacatgtttttttacccaggaaggacaagttgaattgtaatgagtaaagagtaaaggaagggaaggatcagtggataccaggttatagttaggtagaaggcagctctgcgttctgagacagaaaaccctgactgtagaaaggatgatacagggttgatcaatagatactaggttatatagttagtagaaggcagttctgtgttccaagacaaaaaaccctgactgcagcaaagttgttacatcagatgttccaaatggctagaaaggaagatgtggagtgtttctaccatagaaaaatggtaaatgtttgaagatatgttgaaacaacacgtggtgccccttatgtttttaagttttgatgtgttatttaaaagtaaaactgagcagagtggtgtgggggtggggagtttggatatacctgtcggttttgctttttggctctgacactcctggtcaggaccagcagtctagactctgcatctcagaacgtcctgtgaaggatgttgggtggcctactagtgaatatacatgcatgatttcaagatcgatagttaataacaaatggctcatgtttttgatgcactgcttcaaatttcatgaaagctccctgggtggtttttcagaatcatatttgccgatcagcagagtgaaaattagctgactttagttgtgtgtggggcatatctgccagaaaacgatgaactagctagcatagtaattgcaaaaaatgattttaagccacatggtcctttctcagccaactggatggtgttcagtactccaagagtttgaggcactgctgtttctgtagttggcacacactttcctactggtttatactgtcatttgactctaataaaatctggtggagtttgtggcattattgtcccagcagcttggacatcattcttttaagatgccttatttggttgttttaattgaaaatgcaacatggtggaaatctgcaagcattctgaggaaatctgtcgcattctgaggctagcaagagtcatctgagaaggacagactccagctcagcagggactcgtgtgctggtgcagccactgagtcaagacctggtttaactgtactagtatatacctctaaccaattctagaccccctcaaaacattctactcttaacatgagcacatatgaaaaaaagtagtttatattgatcatttcttaagtttgtacctaactgaatttcttccagttctccatgtcaagatgtattggacattgagtctggggacaataaataccattgataggccctgatctccagccaagagctaacccatgaacttcaacttctgtattctatattatcctaatattgtttcttaaaacttcagaggaggtccccaagaccacccagtccagtgaatcactaggagggctctcatgactcattgggtagtcacactcacagatataattgatgtcagtgaaagcataccaagcaaaatcagcagatggaaaagtcccatggggcaaagtccagaagaagccaggctgaaggttccaagagatttctcttagtgaagtgccaggaaagcactttatcccccggcactgaatgtggcaatatatgggacatggtgtcttaaaacctcactttgctggtgggagtggatgttccaaagtcctagcacacagaaagaaagcaggtgttctgacacacccagtacccaaaggctttaagtactatgagcctttcttatcagggtataatgagaacactcccaatatccaaggcctcagatgccagaaagtggcccaccttgcgggtgaccatttaaagaactccagtctcagacctgctatgttaaacattgttgtgccctgaaaccatgcatgatgttgccctctggatgccataatgatttttctccacagttcgtcactccatggaatttatctaacagaggcagtagttttttccatgatcacacagatctacattgttaattgtgttaaagtagaccaagagtgacatgcacggtgatttagactaaataagaagggatcctgctactgtaaaaaggcagagaaagatcaagtcaacaatgctggaattaggaaggggaatgggtgtgggagcagcatccaacaaagcaatgtgtggggagatggaactcaggtcaaatgaagtctgtaagcaaaaggcagtggggagacagtagataaaccagaaaaggccctatagaaaagatcctggatttggttttttgtttgtttgtttgtttttatttaacacagaaattttaaataaaggaaaagtgactaactggggaggtgtttacttcatttgactgttcattagagttttaatgaccaatccgactataacagagaacagaaaaaagtagagcttggggcggggggggggcagatctacagttattacaagagtctaattgggagccaaaaatggtttagattacagcagcaagggtggggaaggagaactgttactgactgaaaggcagagtggctttgactagctggggtgtctttaagagaggaattaaggatggcacagaggcatctgtcaactaacaaggcataggaacatgagggatccagagggtacacagcagagctttagctgacacctgtccgttacattgagatgattatgtcagtgtatatttcattgtcctacctgatgactgtgctgggagtaaatatattaggaatggtctgtacacctatacttgaaagtgctttttgatgggatcaagaactagtggcccacctaaagaagaaaaaagcacctctagtaacatcactttctctgctagtgtaaatcaccacagccttctatgaatatttgagacatacattttgtactagcagtttgtctcgtcagctttgcttccaaagagtgagaaatatgtgccccaccaagaccgctttaccatggtgataaacaggtctgttaaaagaaaagtcatttttaatcaagtttttcaagactttaattagtaaccaatttctgttggagagcagataggattttgacccttgagcttccttaatctgcgttgtctcaaacatggtccttttatcaaccagcttctctgatttcctcatttctcaatttgctttcacctgggattgggatcagttgcagtgaacaaggcattctggggtgtaatgtagcctgtatctactggagtagctaatggtagctcaataaacgtggagggaggatcagccacccagactcaacatgctccatgcccatacaaccaatttttgttacttctaaaacaaagtggtttcaaatgctccatgctgaaaattcaacttccaaaattctacgagacagggacacctggaatgcttctttcccttaatattgttgacagcaaagttggccaggacattaatggaaggaaagaaatccagcgataagaatactcaaagtatgtgtgtgggggggacctatgttggttggaggaagagaaaataatagttgccttcatgtgaatctgacttaccagtttgtccaatgtaagcaatacttggtgggcaacccctgcctgggatggaattctctgttaagcatggatagtcaatatggaatctaagggaactgctgtatagcacagaaagtcagactagagtgagacaagtagaagggagcctctgactccaggaacagggcttgattacttaattgcatggatcaggctcataattgggtcttgaatgcagaggtgccatttttgatggcagatgattcggacaagatggaaaatgcattcacttattattcattccttgatcagaggaaggagtctgatgaaacaactattttttctttatgctaacatggtgactattcaaatatttggtgccatattaatgggaatttttcaaatattactcaagaaatttggctcttgttttattcatcatcttggtttcctagtgatttgaatttgatccttttaagaaagagtactagtagagacattctcatccaagcatataaagcatatgtgaagcccaggaaagaatattatatccagataatggaattgtgttcttaatgatctctctacatggctctggaaatgtagtttaatttatgtcttgaaaacttgatggttgaatctcttactagtgactgagaaatcattcttatatgtcagtgagctgaaagaacttcagcttgactctcagcagtagtaagtttagcataaaattgtttttgtctcatttttatccattgaaatcatgttttgttttgaatgactggggattgaagttggagccttgtacatgctaggcacacactctagaacttaactgtatatcccgtcatcttttactttttcagtttgtgacagggactcatgaagtcgtccacggtggtcttaaaatcagtcagcatcccaggcaggccttggttttgtgaacttcccacatcagcattccctatagctggaattataggccttggttatcaggcccaatgacatttttcttctgagcctgtgctctgtatcttcagcccttctgctttgcattcatgcagattccacaagcatgctgcaactggcactgcacctttttatagttattgctttcttttgaaacaggtcaggctttagaagatactgaaaaagttaaaatgcaaccaaattaatatggtcctgaaacctcattcaagctctcaatgtgtgctcagtcccctccttgtattttttcagttactagaaatatactgtattcatatggccctttctgtactaaggtattctgtttaaaagcatgtccttggactttatcagaaacttaggccacttgttctgaattctggaatagagactcacatctgattcctatttaacatgcttatactagaaacataatagaattttttttactcatatgtggattttagacatagagtaaaggattaccaccctacaatccatattccagagaagctagtaaaaaggaggaccctaagagagaaatgcatggtcccctggagaaggggaaagagacaagatctcctgagcaaattgggagcatggggggaggggagagggaactaggagaatgagaaggggagaaaagaggtgaggaagacatgatggggcagggaggttgagttgggggaagaacagaagagagcaagataagaaataatataatcgagggagacattataagtttaaagagaaattaggcactagggaaatgtctggagagctacaaagatgacaccaactaacaatctaagcaacagtagagaggccaccttaaatgccctctcttgataatgagattgatgactaattcatatgccatcgtataaccttcatccagcagctggtggaagtagaagcagacacccacagctaaaccttgaactgaactgaaatccagttgcagaggagcactgagcaaaggggtccataccaggccagtgaaacccacagaaacagctgacctgaacaagggagagctcttggtccccagactgatcgctgggaaaccagcatgggactgatccagactccctgaatgtgggtgtcactgaggtggccttggaaatctatgggacctcttgtagtggatcattacttatgcctagcacaggaatggactttgggagcccatcccatatggaaggatactccctgagcctagacacaagggggttggcctaggcaagctctgaagaccccctatggaaggcctcgccctccctggagagcagaaagggtatgggataggtagggtgttagttggggggcaggggaggaggagagggagagggacctgggattgacatgtaaaataattttctttctaattaaaataaaatataaaagaaaagaaaaaggaaaataaataaatttttaaaaaagaaaattgaatgcaaaagaaaaaataaaaatatgagtattggtagccctattaacaacttgataatatcaactcatggccgttctttcatttattgcctcctttactcagatcatcttgaagccagtatcactcttcattttatcgctaaatgtccttggatgtatttctataagacaagaaacattgcttttcataataaaatcacagtacagttttcacataaaattttataattatttctttatatattcaaatgtgcagttttcagattcctcctgctgcctactgttttcttttggtttgacccaaaagctttgacataaaagcttaggcattatagttaacctttaaatctcctgaattcttctctattttctctcctttgaaactggagctgagtaatctaggttatcaaaaattttgtgatatgaattttgatggctgcactttgggggattgtttattgaatttagtttatatcaacttttagtcagccatagggtcagaaagcccaaaattcaagttcatttttactgttgagaaggttggagaagattgcagcacattttacacacatcagtgtgtacttccatgtggacttgtatgtctgtttgtctttgtcatatgggagatgcctgtgctcattcatcaaggttcaccaagtgacctctcttctctctgtgatttcttcagttacaggaggaactgtccatcaattacttggtaccacctacaggaaatgcaaggatgctgccgaatgctttaattacattcattaggcacttctttagccttccccaaaggctactgataatttccccccccttttaaaaaactaattcatgacattagacatatttaaattattccactgaagctgtaaattatctatctctgcccattaagtacccattcagttggcttccatgtctcgttgctatgaatcctgtatttttattctcttttgtctggatggaagtttctgtcctgcccaattccaaactgtttgatggattactcaggcttcttattgtctagccctctcttaattatcaactcacttctattaatctatggatctccttgtagtcttggcttaccagagaatgcctgggcatcctacctttcctgtagctacatggtgtctccctgactccacctgctgcctttctctacccatgtttggatttcctacctggctaactcctgtctgtccactggctgaaacagctttatttgtcaatcaataagagaaacatatattcacagcatacagaaggacattccccatcacttttgtcttgatttttgtttatattttgtttgtttaaattttggtatgatgtaagctgtttcctgcttctcttgtgtagttcctgcctatatggaaagaaatatttctccaaggacccttgttccttttttgtttttaatcaattcatagagatggcgataatgtacagtgatatttaccattgggttcatccttagtacttctcagtaaacataaaatataccatagctcatacagatattttctatttaaaatcaattatagatggttttaagtttctgtgttcatcaattttacatcttcatcttttttgtttttccactccaaaaatccagctctcaggcttatattgccctgtatatataacaccatcttagtataacactgccatcataaataccatgattactgtaatttttttaaaaaaatagattcttttttcatacaatatatcctgattataatttcctttctctccattccttccagttccccctcccctctcctcccctctggattcattccctttctgtctctcattataaaagaacagacttccaagagacaacaatcaaacatgactaaataaaatacagtaataagaagaaaaaactatcatgttgaacttggacacagcaacccaacaggaggaaatacagtcctcttaggaaacatttttgtttctttgggggacaggggatagaacccaggacctcacacatgctaggcaagcactctaccatcgatctggtcttctctgaaagcattttaaaattgctttcatgaaactggggtttcttcttagtatcagtcattccgtgtcctttagaaaacactgtcacccattccatgaatctcaagtttaaaaccattttttttaatgatcaatgtgctgtcattggagatcagaaagcattgcaaagacttgcattgctgcagtgtgttctggcaggggactgggggcaatgaaaccatctgttccagtaacctgataccctggaagtatacattctcttttgaaagaatgaaattaattctatgaggtctgtgcacaatagcctataatcatgttctccaatgtgctactttagaagagtgtggtaaacttgccattcatttttaaattgaaggctgaagtaaaacagcaacagaaatgttgccatttgtagagtttagtctaagaaaatgaaagattaaagagatctgtaatgatcagacctgttcattctagagagtgaaaggaaatgtgcagtgaacaaatcatttgaactgggtgtgcactctaatgagcattgagttccttctgtactcccaggactgaaaactaagagttactgcagaccgttcaatacaggcattaatctcatgtgtagcaggatggaaaaatgaaggaaagaaacaaatggtaaaacccacaggaaaaaaaaacagtaaattgctaatgattttaatcattcaacaataattgaactcccaggactggagtgtgagtcagcctgctggagacaaataggaaaacgttaagttttgtcccagagcagaccacagacacactgggaccagccaaatttgtaagcattttgatgaaaccatctttgacttgattgcatggaccccaaatcccaatgtaggaataggtatatgttgcatattaaagttaagaatgacataggagatttctttgcagcaaatgaacaagttacacaaaaaggtgcaaaatatgcctcatctagaacattctttgcaaggattttttttgcgacaggatgtcctgtcattctggttgctactgaacccactgtggcattagactcatgattctcctctctccatcactcccaagtgctagggttgtatatggtgttcaccatcacagtcagcttacttacagggtttttggtaggcacttcaaagtccagtcatttgggatgcactgatttgaagagtccgaaggtttctttaggcagaatacctctgacttattatccttatatacttcatgaatttaagaggatttaaacagccaacgtttgctcccgtaacctgattgtccagaggacatgttttacatggtgttattttaattgagattgaattgcaaatgatcagagctttcaatcacttaatttggggaaaggggaaagaagaggattaattggataatgcagatctccaggaccccattcttttggctattgattcattttttttttaataagctacagctcatggttgtaagataccttctgtcagcagtttctaggtcaaatccaatgggggaaaacttcttttctacctccctcccttctttcggtatcttgtgcttgttttctctttagtttcaatggtcttgtgttgctggattcttgtcactcaaggtcttaccacccttgaaccagaaaaaaacacacagacactactaatcaatatatttctacatggccttaccttaccagagaacacctggtgcgacctatcctcctggtctctacatggagtctctttctttgcccgccctctctgcctacctttcccaaaattctcctcatctcctagtcccgccagtcttcctgcctctattggctattggccaaacagtgttttattcatcaaccaataagagaaatgtatatacagaaggacatccacatcagccttgttagatagctctgggacaaaatgatttagaagagtcatgtggaagaggatatgaaagtacaaagtggactgtgatgtcctgtcccaacataaatctggggtcctggtggacatcttcatggatatcccaaaacagagaccacataggtttccagaacatttggctggtgagctacttacccaagctgagtttggtgctggctagcaaaagactgattctgctaactgatttctgtttgacttggggtagtctaaacatggctgcctcttcctaagctatctcccactccatcattctggcatgagttctatactgtgcacactgtgatacttctccattagaaaaaaaaatgtttttaaatggatatgtgattggttctcttctcccagcattttgataaatttgaaatccatagatgtgctgaaacaatagtataatgaacacaaatgttgaattcacctggatttaccaaaagctattattctctctttgtatatacttgtatgtgtgcgcacacacacacacacacacacacacacacacacacacacacacacacacacacacacttcctctttcctttctctttctctctgtctctttttctctccttttcccatatgggaagtatgtagtagacattgcaaattttttctatatggatcaaaaaagtccttactaattcttttatcatattttctttccatattaagatcttgccacaataccattttcaatgaattgatcccttttgatccagactctgaggttatacattgccattgtttgttccctttccttatctctcctgcctctcaaagttagggttgaagggtaataggatgcagccgctcatgtttatgtttttgcttggctcttttgttcttttcaacagggtctcattgtatggctctgactggcctggaattcagatcaatcctgcctctacctcctaatgttggtggtttttctgtgctcagttttaggtagagtacatctcattttgaagtatgttaatgatttgttttatgtctagatgaggagttaaatatttgggccataaaacacaccaggatggattatattttctcagttcttcatgccaggtggcatgatgtcagaagtctcaacatggtgatattaaatttattcactgattggtagattgcttcattataaaagcctagtttgctttataattaataaaagatcggagaagtgttattttgggatgtgcaaatatcctgttcctggccaacctttaccaaggtgtcgcatctaatgatgactcctgtctccatgaatcattctgtcaacttgcaagatgattttctaattctatggtctcatctttacttcccttcctttctaaatatcatgtgaactcatggattctttttagatataatgagtcatttctaacactactcttttttggttcacaaattgtcatggtttaaggaataagacaccgttcaagtgggatccttcacactctagagaaatcccatcatgtttttagcactttgtatttttttctgctccagatatcaaaacatctgtttctccataggtggttactttggttgagtactccaaaaatcaatggtaagggtataacttattatagacccattttccttgtatagagctaagaatgcagtcatcatcagtcatctgaagtcaaaagaacaaagctcctagaaccgcaaaatctcttgtatgaaagggcatgtgtcttagatttctgttgctatggtaaatgccattaccaaaagcaacttaggaaggaaaagagtttatttgacttatacatcctgatcgctgcctatcactgagagaacccaaggcaggaacttgagtaggtgcctggagaccagaactgaagcagagaccagggaggaatgctgatgactggcttattccccatgacttgctcagcatctgaggtggtacctcctatagtgggctgggtcttcccacatcaatcatcattcaaaaacagaaaagaggaagggagggagggagggagagagggagggagggaggaagggagggaaatcctccataggcttgcctacaggccaacttgatgctgacattttctcagttgaggttctcagatgttctcagagtctcctcagatgactctagcttgtgtcaagctaacaaaatccaactaacacagcatgggtggtatttgcatctgaccttcccaccacccatgtacccaactgtggatgacttataattcccagacaatataaatgatgcctgaatagttgtccagctttacttcttagaggagaatgggaacatgagcaccacaaatgtggctctccaatccagtgttttagatctgtagttagactccatggatgctgaagccatgagttgactttaagcatatggaattcagagtggcaatcccagtgctagacaagtatcgttcattcttcctctttctgcctacttcatgtttttgccccttcctcccactatgcaaatcatagttgtcaagaaaacaaaacaaatttcttagatacaacttgactattgaattgctatctcagtgtccctacagatgatagctctgccttagtaaaattcacatttcctttttatctctagaggttaatacatgaggcagtatattcagaatacctattctaaaggtttaattttatgtttttcctccctgatcatatgatttatttggttaattactttttattctgatgaattttcccctttctctctatacttattaatttagttgtaaaatatgtaaaacatgactcaaagtaaatagcacggggtatgctattttctgttttttacctttccttctgtttattctttgtgtttttcacatcatgcatctccatcccattcaccaccctctgcccttgcagcgcaccccaaaataaaataaactcctaccagtggagttgttaaatcaaaagcccaaaattaggaagagtttgtccgaaattggccagtttctctcgaatgagggcagaaacaccactcctgtcatctctttttgcttgtaacttctaccctttgccttcctcatgttcaagttttggctaattctatagactactatctccaaagtgatagcattgctttgcccaacctttattatggggagttgagattatcttctttatgtgcataaatgagaaaatgctgaaaagctgagcagggtgtatcaaaaggacttaggtgccaacctttgaagttggcacctatgaaacgagacaatgttcattctctgtctctgtctctgtctctgtctctgtctctgtctctctctctctctctctctctctctctctctctctctttctgtgtgtgtgtgtgtgtgtgtgtgtgactgagaatttaagtgaacctagggccttgcatatgctaggtaagcactttactgctgccctgtgtccccagttctttttgtggttttttttgagacagttccagtaaattgtccaggctagccttgaatttgctctatattccaggcagaccttgaattataatcctggtttacccttctgagtatcttggattacaggcatttgctaccaggtcatgtcaaaccatggacaatatagaagccaaaacataaagactaataagtaatatccttgacagctcaatgtttttgaaaatgcccataacttcgtaataatatttaataaggaatgagagtaaagagattacagatttagttatattttgcttgtcagacagttctaaggaatatttaaattagcatagaagtttaagctcatttatatttgtatatatatccaataaatttcatttagtctctgctgtatcattctgttatgtaaatagacagtgcctgactttcagtgcctaacgggggtgctgggaaccaaacttaggattcttcagtgttacaatggtgcacaggcagtttgcatgcccgtagaaatggtctttgaattttgaagagcttttccagttttctaggaacttcagtcacagctcctaagcagacacacagtcccaggagaaacagctgttaccatgcagtgtggtactgataagctggagtgctcagtagggtccatgtgttcagtgtatctgacttgggatattggaacagatgatgggctgcctggggaataatctcactctggtgtaacttgtgtttagaatctgtgtttttgactctcacttaagcccacaaaaaaactggatgtaagatggaagcttgacatctctgccttcattttgcatctgcttcaacattggctcacctgttgatatcatcttacaggcatgatagttgcttatggggtatctgtatggagactttaacacctaattcagtggttctcaaccttcctaatgctgcaaccctttaatacaggtactcatgttgtggtgacccccaaccttaaaattattttgttgccacttcatagctgtacttttggtactgttatgaattgtaatgtaaatatctgtgttttctgatggttttggaaaccctgttaaagggtcagtctggcccaaaggggtcacgacccacaggttgagagctacttacctattcattctatttccctttagtactgaagatatgaaggaactaaggaatgtcactgtcaatttttcacagtcttattccagacacccagtagataactaaaggtttctaatcatgctcacaattgtagccaccttagattcaattccaagaacaacagagcatcactgaggcagcatcctgaagaatgagaagctatcttctgaggtccagcttgtctttggaaacagctgccacttttacaaagagagatctgtcagtctgtcatctatctatctatctatctatctatctatctatctatctatctatctatctatctatcatctttctgtctatcatttatctgttttatgtgtatcagtatgtacatcacatgtcatatattcaggtgccttagaaatggagttacatgtcattttgagtgacctgatgaatgtgctgggaaccaaacctggtcttttaggagagtagccagtgctcttaacagctgagccatctctccagcctgtaagaatcactgctttgggctaccttgcaggcagagctaagaaaccaataaaaacagaccacttctttccctggtctgcttggttacccatgtctcttccaccttcatccagttcttcacatttaaatgtaaagcttgtgtctgtatcacaaagaacttggagtcagttggctcctttatctatgcgcattgattcaatcacttccatgtcttaccattccttttctctggacttggaatctgagcatagcatgacagggctgctggaacttggacttctgtcctaaattctggtcctcgaaggccaaggaacatcaatacatatttacttgctgtgccttactgtgtagcgcatcccttgctcttctaagactgtttattttggttttcaggaagttctgtatagtttggtgattgttacagaggattttatgtacgtgcagtttttctctcttcatttagacatctgtgtttgcttcctcgacgataaatgaatgttctctggctcctacctgtggtgcaatttatctgttttgcagtttctcttttctttcattttaaatgcattcttcttcccttgccagcgcatataatgcatacttgctcttcgtctaccctgcttccagctttgaaccttcaatttactatgaaatatatgaaatatccaggagtagtcctttcacctgtcttgagtggatgaagcctgcccactgcttgatgtccttctgtgtgcagcacattctgggtttctgtgatggtcagtttgtacagcctggagatgctcagagaagcctggttgcatttctgttttccctttgttgacagtgatttcttaatgttcttttcgtttgtttgtttgtttggtcttttggtctggagacccaggacacattttctttcagaatcctgtttaaaattgggcacaggaataagcatgagcatgtgtgatctccaaccccattttctcagtcacttcctttggatgccctgttacagtatttgaattttgttgtagtcaggccattcctccatgctcctgattattcattcagctgaatccatcctcccttggagactgtaatctagtgtttattcctagcgaaatctatcatcaatttattaccagggtttagccaaatctagttccatgtctttatggatttttttctagtttatatatttatttacattttttcacttgatctgaagtgccatatctgcagattttatttccatgaattgctctggggctcaggtacagagctggcatttttgttaagttgtgtattttccaccagaagtcttatcagctacagtagtttggttctttttatattttttcatacaaggatattggatgcatatttgtgtatttttagtttcttaagctgttagtggcctattgggaaatccttaggtcaatggggacaggcccttggaaaggattgtaggaccacagctttcctgggtttcctgccctgagatgtgtctattgtgcccacatatattcctgctgtttcaaatggagtccttaccagcatctctatgtactctctgagctttcagcctgtgaaaccattctagccttcttttagcaaagaaagttgggttgactgaaaagatggctaaggctgctcttctagtagactaaatttggcttgcagaacttccacatggctctcagacatctatcactcaagttccagaagatccagtgttctccttggatctcttaagggcacttcatgtatgtggtgcacagacatatgcaggcaaagctcccaaacatataaaataaaaacaaattcaaaaggggtgtgtgtttgtgtgtgtgtgtgtgtgtgtgtgtgtgtgtgtgtgtgtgtgtgtgtgtgtgtgagtgtttgtgtctctctgtgtgtgtaacaacagttaaaagcaaagaggccatgtatttgagagacagcaaaagcatgcatgggaggggttagagtgaagaaagggaatagagaaatgaattataatttcaaatgataaaaaatttgccccaaaagtacatgtccttaggtatggcattctagtaaaggtactggtacttactataatacctaggatgagcaggcaaaatatttcttgaagtaaaaatgctaatttagtgacaacttgatgatcatggtatgaattgttccctaatgacatgtgagaacaaactaacagaaagtttgttttaattcctcttactctcaatccaagttaaataagaacatttgttttctgagatgacaccaagcttaataataatattctatatgtttgatgtttcaaaacctgagcttgaaaaagttaatcttccttaagctctactgcacaatatgaagtagatatataaaagaaagtcatatgtgtagcctagcaaatgtgattgaagctgtttagatggcacatggaatgatttaataagagctaatgtataaaactatcagtcggttttttttttttcttcctggtagccatacttcattctcccttgctcaaaacctttggttatttgtgtgcaactcttctcagagaaagcaaaccttgcctcagtccttagggacaaactgaatggattggactaagctaggcatgggacttatgcacctcaccaactaaacagggaggtgttcaccagtgaccagctacaccaagcaaggtctgtttgtgggaaacatgagagaaaacatttgatgacttctttccttttgtgaggaaaataatatgtgaagcaatggcaattatcttgaaaccaggagacatgtccagagaataaaggatgaacagctaagagtggggtggctgagaaatctttctttaatcacttaaaatcctccaggtttgctaagtaatagttaaacactctttctgactagggttaattgaattttcttttccttgcagctcaaaatatttgaaattaatacaaacccctttctaatctcgagaattactggctaaacccaccttttaaattttttcttgtttgttgtcttctaacagtctttggggtactgccctgttccccctcttacattctcttgaaagcaaggctccttggaataaaatgaagatgggggcacatttttttctactggatcaaatgagcagatgtttgggtgcctgaaaccccacatatttcaatgtgtcattgccagtttttgctcttgggaaactttctgctaagtcagaagtggacacatatctgtcagatatcagggtgatctcagccatgtttactgtacagtgcttagattagttaaccttgaagagtttgctatctgggtagatagaaaggataatagatgcttgggaaatacacccctgaggatgtatgcattgaggtaagtccagctgtgggaagctgctaccctcctggtgatgtaattgtgttaacattcctcctttcattagtggatggggacaaactatgtggcacaggaacagcacttcattttaccccaggtttgctcctataagagttagggtttcttccaagaaagttaagcacacggaggaagatgcaccactacatttgggtagctacttttctggaataattttctgtaatagaagacattctgccaatagctattacagcaagctgtttggttttattcttggaaggatctgacttttttttattaataagaaaatcttttacaattatccttggtagtgtggggtaaatgatgaccgtgttttcttgctcagttcactgcagggtctggaatctcgccatgtgagagagggcatcttgcctgtagagtcctttattgagtataagataagcagatacattatgaaatctaatcttttctgaagcctttgcttcatgccgttacagacattgtcctggacacattattggcctctctaggcaaaatgtttcattttcctggcgttggactttgtaaattttcttccagtgtacatctgcaggtggacagtgaaagcaaagatgtcagggagatgcaagcaattattttagctcagtctaggaggagcaatattggagtggccttttagtagctgtctgaatcgattttgctttctgtcaggctgtgctattctcactttgcccataagtagatttggtttggggcggctccggctcagcaataacagtacatggtagcctctttatttctcggagttttttgtcctaagaaatttcttggttttgaattttagttgcaaatgtgtctatgttaccttaaataggaagagatctagaacctcaattttacttccactacacccctccaggctgggatttattgcctgatgtctaaagaagtcactattcaaattcaagtgtctgtgatcattgactacaggccaacataataaagacaaaattgtaaagaactctaaatttaaagacacttccctcaatgttttccaaggctgctttttcctttataactattactacaatctctaattacatgtttcatttatcttcttatttattacagatatactctgagcataatatttgcaaaggctagaccttctgtgtttttattacctcttataaactcctcattaagtcttggctggaaaataaaacaaaaatatgcacacatgaggaaataaatatttggcagttaaaattctatagactttcacgcagcttccattcccctagtgcttatgagattaaaaaattagtaagtacactgatgattcccaactttatattaatagacttcatgatggtgtaaaagcaatatgcatttagtagaagccaggcctctgattttgaagtctgtggtttcccaggctaggtgtcatttctctagaggtagcacaggacctgagaaaatggatttgatgaatgaggtggactaaagtctcatgcaatgcaatagccaattttattcagagccatagacaatttatactctgaggattaagaaaggtcacatgagttaagttctcatgagttctgggtatatacaatcgcaaggacaagccacatgttttctttccatagagatataaaggataatttaaacatttaattgaaaatcaaaaattaattgataaaaaataattaataaaatcaaaaatcaggaagcaataactagtaatctgaggtaaactcacacctatctgctctacttgggaggagcaagaaaacatagtccaagaacaattccttgtttttgtagaagctgaagtcacaagactcttgccttgttttcttgaaatgttcttataagcactcagaattcaccttacacaactccattccttgactggtggttggacagcagtactcaataggatgttttgtttctaaatacattaaactatagcgaccatgtagtcacaagggccagcaaccagcttactatgtgttgttaaattataatgtctggtaggtcagctataatcaatgcctctttaataaatgttaattttcagttcactaaggtaattgataggaaatcctcttataaattgagtatctgtatatccttcaggaggccttgtaggtagcacatctgtaataagcacatgttaataacagaaccatacacacagcatagaaaattttccaagtgtttgaatgattgaaaactttagtttaaatgtcactcacaccttcagagatctgtcttcccagctgacatctatctgtaaattcatgggcagtcagtcctaaaggagagacacagcactgagcctactcagtccatgctactatgaatgaaaacaataaagcagtgtttgcacatctgggttttggagtcaggttttccatggtgtaggaaaaagagttgaactttgactgtttgtcctaacaatttccccttggtaaaccacctaacaaagattattatatatgctagacctattttctgattccatgataacaaaaagactaattaaacctgaaaaattcgtttcactagaattaaaaaaaaaagaattgggcaagtcaagtagttaagtgtattggtggattgtagagggagtttctgttcttagtcccaccacgcttcagtcccaaataaacacactgaggtttatattaagtgtacactgtttggctactggcttagccttcttaccagctagtttctctcttaattattaaacccataagtattaatcccggaatttctgcatggccttatctttctggagaatgcctggagtcctatctttctggtagctacatgccatctccctggcagctcactctccgcatcctctccccagaattctggtagccctgcctctactttctccttggctactggccagtcagtgttgtattcatcaaagtatatacataatgtatatacaaaaggacatcccccaccagtggataacagagtacaaaggtgaattcatgatttttagcaactagttatggctcaaaaggttttgattgacctcccttcctattctgatataattgcttgagttaaaaaacataggaagtttggggctggagagatggctctgcagttaagagcacttactgttcttgtacaggaactgggtttacctcccagggccacatcagtcagctcatagccacttgtatgccatttgcaaaggatgcaatgccttctagctcccatgaacacttgcatgcatatgctaagattaatacacacacacacacacacacacacacacacacacacgtttttaattacacagatattttaagacagcaatattgacacactggttatctcatttccagagcttctatatgatgatttttgcagatttcttgcagaaattactgtatatgaggtagtagcatatttgaggttatggcgaaaattcctcagaccttcagcttactcagaaaattgaatttataatcccatacatatagagaatggcaaatttctaaaaagcctgaaaaggccttgtctattggtgtgaagagacatcataaccaaggcaacccttaaataaaaagcctttaatggaagctttcttactgttttagaggattagtccatgatcatcttggtgtgaggcagacaggcttggtgctggagcagtagctgagaactttacatcctaatccaaaggcaggggagttagaatctgtgcccatgcatagaaactaagaattgttattcaactagggcagtctagctggccagcaaaccccaggaatccacctgtttcttactccccagtgctaggatctcaagcagttaccaccatgcctgatctgtttgcatgagttcttgtgatccggctgaagttttcatgcttgtacagcaaatgctttaccagccaagctgtcccctcagcccttgagtgccatcttaagaatgatcagaaatactactattcatgttttgcaacaaaatcgtgatccttttcgtattgagtttaatcaggctatttgtgttcctttaggatagcttaggtgcttgttctctggaagagtgggggttttcacataagtatttatcacattagcatcatgaagtgcacacaactctactgctaggtgtattttgtcctctcttcttgcctgtcccctgccttctttccttgtaggtacaacctccatgactcagttttcactgacgtgtctgttgaagcatctaatctattaaaagctcttaattccaggagatggcttatcaaagtgaccttttatgtgttgtagtttcacagggtcttggaaggatgtgaagccttcagtaagaatttgagagaaattgaattataaaccttcatatatttttctgtgtgtcatttacctgcacatgcatgcatacatacatacatacatacatacatacatacatacatacatacatacatgagagaaaagctgtgttgtcaaaacctgaatgttggaaggcttggaggatggcacatgattgttgaaaatgattattttatcatttgaaaaatcactaccttggcctttacattccatgaaaatattgactcatgaactaatttaaagatgctaggtcaataaagtatgtttaggtatttgcaaataatagtctcatttttctcttcgtcctcaaaagtgtctccaaattcgacgacaaatgttttgtgccacttttttcttcaaaactcttttgtgagcctgaaattataatgatagaagaatagctgagttctgaagcctgttggccattcttcttcaagttacactctaatttagagatggggaaatatcttccaggtccattgacaggacttctgaacctctaatgaataaaatgaagacatgaatttctccatggagtcatgcataagagacagatacagtaaaattcataagcataatttggtaaacaatataaacaaagaaattacattttagaaaaaaaacgaggttacttcatgctaatgttccctttattattaaataatgcaatctcactgcttcagagaaccacgtttaaagcaccagcgtgggatttgcttcttgtcttataggctcctaaggaaaacattttaattgagatcatccccaaataagcaatttgctaatttactaatagtactattttgccagagagtggaatattaagatctggttcatgtggttctggttcaagtgaagagaaactaagtttctcttcaactcagattttgcttcatgactgaaaagggaagacagtattcaaatagagccccttaacaaaaaccaaagcagaatcaaggactatctggtacccatgtgacatgtattgttccaaagaaaccatgattctgcacttctgaacttccctctggacagaatggggttttcaacagatctggagtggacaatggctcacctgccactgtgtcacttctcttcacagtagaataaccaacatcctttttatatgattccctatcaaagctttagttcccacatatctcctggggacctgtgaatctttttactgcaaagtttagtaagcagtgccttatttgagctggtgtgcagaagacgaattctaagcatgtttgtgtctcttctttaattacctcaatcatgtctttactatgtcatttatcttctcctccttctctcctcatttttttgaggccaggtttcatatacccaacctcaaattccacatgttgtctttaattcctgatcatcatgtctctgtcacctgtgtgctggaactacaaggaagttcactatgtctcattgtctgtattttttatttctaccttctatcataatagcctttctacatgaatcagtcttctccaaagaagtaaaagcagtgagaaatggaatttataaaatggagaaaagaaaaagctattgtgagggattggtatgcatggtcaaggagcctgaaagactcatgatttagtgtccagaggctgggagcctagaaaagccagtggcatcattttatgtactcaaaaggcctgagaaccacaagttctgaggttaggatcacagtctatgtctgatggcctaataatcaagtgcccatgtccaaaagcaggaaaagatagatactccagttcattcagaaaataattttacctttcctgtgacttttgttcttctgggaccctcaatgtattggataatgcccacagcaatggtgagggcaatgttctctaatgcagcaaaaactattcaaatgctaatttttcctggaatcatcctcatagacacatagtcagaaatagcagctgtctatgcatctgttaacccagccaaattgaaataacaacaaaatacttgttattcatcttaccctgtaagtaaagtcaatccattttactgagaactctagagattatccggatattaaccaacctccattacaagtgagttataaatccctgggaagataaaacacatgtgtaaacagaaatcactgacacaaaggccggatggctgagcaggaaaccactgactatacctgatgagagtgttcttccatttaaacagtgatctgggagttctgttaaaaattactttatttgacaaatgtagttcatccatggtccagcctccacacttgtaaggctgactcttctaatgatctgcatcctttggttacatgaattttctcctgtcatcccagactggcttccttccttcagagtggcaacctcaggtatgggttgctattttatggaatgaatattctctgaatattcaacctcacatttttccatttgccttatttcccatcgtgctcctttcaaccattgtcctccaaaagcctgggttatttttagatcagaaatagtcagcatctctctgattattacacatctttacaaggctctgcagatctacctcagcctccacctgctctctggtgagtcagctggtggatgggctccttcaatgtcatttctctaggagtactctcagccttcccacactctcccgtgactagggttcatgtccttccccaattataaggctttgcttgtgttttgtaactgcttctttgtctgagatgtagactaaacctccaggacttgaacatagaaaccaggccaaaaccattgcagtggctcacatgtaataactgagaaggaggaatgacaactagaggaggctatgggttaagagccagacttctaaaacctgactcctttgtttttagactggtggtatttgagaatggtctgaactgttgagtgtagaaatctctgtgtgtataaatgtttagtttgttttcagtgccacagagggcattaagaagttttaggagtgttggttactctttaacacggaggccaggtgatacagctgaaagcaactccccaaacaccactgtgagacgtacaaagatccctcaaatatgagacatgtgagacatacaaagatcctcaggggacacagatgtggttgttagtgtattgtgtcagttagtggttttcttaagtacttttaagattgaaaaatactgatttcaaaatgaaattaggtttagaaaggtgacgatgggaaacgtccttttgtctagacctttctgtgcactggcaccttgacttgactccttgatcttcccttgtgttaggatttaggagctaaatccattctccttatcctaaaaattcatgtgttttatttccccagagatttatagtcatttgtaatgaagtccttgttttatacctttataatttttaggcatatccgatatactacagccttctccctaaatctcctttttttttctgatgtttccttggtgttatctggaattgtactgaaaatttgcaattcctgtaatgaacctttgtcaaaactaaattgtaacagatgggagctataattttagcagggttggaataccggtacagagtgaagaagtgttaatgatacagggaagaaaaaaatgtctcaccagtgtcccagtaggaatttggacccctctttgttcagctcatgtctttctccaacacccacccgtcatcaagactgcagatgtgaaatcccattcagctcttctcagctgtccctaccagtgatccattgccctttctgtgttgcttaacccgactcctccgaaggagaagaaaatcctttcattgggttacaataacctgcccatcaaattctgtctgcttggttctctttttaacaaatatttttagctactattgctgagtttcacaatattgaaaaacagtggatttccttgggtgatttcatattgttatccacatgaagaaattagtacaatagttggctaggaaagggacattagtagtaggactagtagttcatttttcacttggaggaatatcagttctattcctgtttgatttattacaactcttaatttctaaatattacaaagaacttcaggtattcatatacttttccgagcctactagatatatttctatgctggtcaggttttttgtcaactgaactcattctagaattatctgggaagaagaaatctcaactaagaaaatgcctccatcagattggcctactccattagtaggcaagattgtggaagaattttcttgattggtgtgagatggcccagtccacagagggagttgtcattcctgggcaggtggttctgggattatacaagagagcaaacacatcaagctggtaagaaatgttcctccaaggtctctgcttcagtttctgcctgaggttcctacttcagttacttccctgactttccttagtgatgtgtatgacagacaaacccttttctccccaagttgctttggtcatggtgtttgtcttagcaataggaaagccaaagagaacagttttgtaatatgtctctagtacagacttttgtatatttaattctagtttattgtgaacattatatagtcaaaatttcaggcttatgtgctactgtcaataatgagcaatgacctcatcagtggttaatttgaatagtggatattttcaatgtcagcagagaactgacaacatgtaacagcaatccaagggctacagatgcagttcaatagttgggtacttgcctagcatacacaaggccttaggttctattcttaaggacagcaaaaaaaaaaaaaaaaatcaaaggtcagttcatggcgtgggggcgactgttagtcatttttctattgctgtgaagagacgtcaagaacaaggcaactattaaaagaagtgtttaattgggggcatgcctctagtttcagagatttaatctattataatcattgtggggaaatggaacatggagggaggtactggagcagtagctgagagctaagttacatcctgatccatagatgggagacagggtactgtcatgggcttttgaaacctcagtgcccacccaccccaaacgcacacttcctccaaccaagctgcaccacctcctaaacttctctaatagtgtcacttcctgatgacaaagcattcaaatatatgagcccgtgagggccctcttgaatttagagaggtttaaaaagaatgcttttcaccttccatttcccagaatgaaaggatggtgaagacataacaaatgtatatttagggtaatttatttgggatataagctgtccattgaacaaaccctgcaatacatttttgaggacacaagagcttgtttccatttcatattttcaatcttatttctaggaacttagtcacctatacatggacaccattggaatagcattattcagagtgaaggtacatgcgtgactgtaaatatttaaactccagttctaatatgctgaacttcccattggtctcttggcgaactccaggctgtagacacatgtgtgttgacaccattctatataccaggcttttgtcccagcagaactctcaaagggactgtggccagtatatgtgcttttatccttgagtgctgttttaacatggctatctagcaaggagatgtaggccagtataaagatcactttcatcaggctcttcaggaaatggtgaggtcattctggtttcattgctgggtgatattagtaatttctctgttattttctctgaatatctcaggtatataacacaactatgttagtaacatgtttggaaatctagacaactgaaatattttaataatcaagggtagggtcttattcacagtagatccttcaagttgcccctgacttactacttttctgcaagaaacaatcgaggcttttattaactcattcatcctcatcatatttttattattaatatcatttcatcttcgctatctgggccacattccatgttagattaccaaacaaacacatcagttgcacagttcccaactaccaccagtgattctgtggtggcagatgtaagggatacaaaaggtagtaccagaaagtttaaaatgatcaaagtttgattcagcagaagcaagggtggaaacgttccaaaaggccatggctcactccaccacacatgttttccattgacggctggtgttcttcagttttcataattaccacttcaggcttcgtctcaccactcgaggatgcttattccatttgtggcttgcccatttcctgtgcatttccttccttcaaccccccccccccggctacactaacattacccccagtcacaatgggtaccacaggtgctcacagcaggttttgaaaaaaaaaacatataaaatggaataatattgcttcgtattaaaacacttggtgaagagaggcccacatgcttggccagaatgggacaattggaaaagtaggcattttagcaatctgcatgacttctttttgctattgtttcttttagccaagcaagtaactggccagattttgctgaagaggtcagagcaggaagcataataacaatttcaactggaaataaaagttggggctgcttattccttctgagtatattgattaagcagtgtttatgaaatcttaggttagacataagtccatgggtcatttggggagacgaatgcacatgtgtcagccatgagcagtacagcacaacagaagccagtgagcatgaggtggagcgtgcagaccgagtgtacacattcatttgcaggcctgtgctcctaagttcctgggaaggaaaatgcgaagcaagccataggcggctctgcaggaccagtgctgtgctcaggaaactggagggaggaacaggaacagcatttggtcatagagcatggttgtaaagagtgggtgtgtggggcctttccctcctttctagcttactaccctcagtgtcagtctgtccagcagtcaccaccgtttctctccctactcttacccatatcatagtcttagtatgtgctgcattgaacaggactctagtccctggctctttcttggaccatcactccactctgtgctgccaagtgctaacagtaacatacctcttactttctgagagactgaagtctctttctgactgttcccttaaagcagcacactcagacccctccacattcaccttcatatggctctgtctctgtctctgtctctgtctctgtctctgtctctgtctctgtctctctctctctctctctctctctctctctctctctctccctctctctctctcgctctgcctcaaccccttcaaaccacaatgaccattttcagtcatcttgtttattcatttttctgctttttttttctgtgaccctcctctaggacaatacctaacatttttttgcagccacacagagcatacagtaagtgctcaatacaatgtgtgttaaatcccatcagcggcagcagggtctccattatgtttagggcagagaaaagttagcattcctttccatttcctcagcgtggagctgtctgttgagaggcagaaagaatatagtgagtggtgagtggtgagctggtgttgctatggcattacagaatcacacgtcctttcctttgtgcttcttctgagtcttcagaacctggaaaacagcaaccctcaagagtatttcaaagagacggacttgaaaggaacaattatgtgggttgaaccaacatttgtaaattatatcaggaaaagctgctggctccattcctttttcagtatgtttggacattgcagctcttgcagaatgaaatttccgtgcataatgagccaagatgttatgttttcagccgccccttgaagcccctgtatacatttcctgggtagagtacccatcttggttttgtactgatcccatccttttcaaagaagctttgaatgaatctgcccaccagtgttagttttgtgaaagacgtttggagaacctgctgtcttgaggtttttgtttgttttgttttgttttgtttttctcatagtagcacacctctaagttgctctacaagtgggacttgagcctgttccagttgcagctggattgggtcctagatgtctggctaagacacaagagcatacatgttcttcagttaccctctttaggtttataatgaaatgcagcagtggttatttacatctcattaatacatgatgataataaaatgtcccttacactgttgatatactagatttttaaaacttcttgtggtacccaaactggtacccactacctatcagtttatatttcccctctttcctcgcatacttcttttggtatcatcccagttcccactcaggggatcaatgcgtctcttctaataggcagcagaccaaattgctgttaattcagtactgactccacaagtgggtaattctccgatctgatcgctatttagtaacctagaatgcccttttcgttcttcagcactgcagtgacaacacacatccctgccagtcagacatgaatattgaaggagcctggaagcgaggttatacggggaagaatatcgtggtgactatcctggatgacggcattgagagaacccaccctgatttgatgcaaaactacgtgagtgttccttgtggccagaagtcctccctccttggcaggaggggactcctgtggggatggtcagaaagtgggagagctgctggcaaatgtgccaggagatatggcaggttctgtactttgttcccttcttgtagaaggtgagctcttgcaggataggaaccacaagatactgtctctcatttcccatgcctttgatggtgtgaccttcaaagagagccatgcctgcaccatctgttaccagccacgcccactactctcagcaattcaggaagacaggcaggcagcactgtattttgtggaaaagagcagactgggagcttttctccagttcagccacctttttcttccctacttctttcttcaaaaaacaagtttttaactttttgagattagaatatgattgtatcatttatccctttccctttcattccttcaaccatgcacacacacacacacacacacacacacacacacacatgtatattcttaaatacaacctgcttaatctgtataatgttacttgtatgtatgctttcagcactgaccatttagtgttggataagcaattggtatgctcttccctgggggagattatttctctagctcttggcattccttggatgcctgtagttacttgtgtagtgttgaggcctgtagacttacccagtctactttaacatgtctattgttgaccttgttcagctcatgtttaaatagccatattagtgagactttacacacacagtctcatagtaaactcccttttcctctggctcttacaatatttctgcctcctctgccccactgtgccctgtaccagaagtgcaggagtcattttgtcaccacaagtctgtattttgactggttgtggttttctgtaatgctctcagtctgttgcaaagagaccttctttttctttgcctcccagtactacacaccagtcaatcccctttctcaaggagaaactgaagattcatttagatctactttgaataggaatcagtggctaaactcaccctgtggactagagcattcaaataaacttgggcctctttgcagcatagaatttaaggcttgaacttctccccatttacaagtaaagaaaataaaggctgcagactgaagtcagctatcctgggtgagatgagatcagacctctagcttgcctataccccagaagagacatctgccttgtcacatgcccgcagagtgtctctctgtgtgcctctacctactgcagataactgcaatccattaagtaaaactagtttctacctaattgtgatagcagtttttgccccttttatgttttccctctgttttagttatcagtgacggtgctgtctcagttccaactcttggtggccagataaaagtagagaaagcattagattattcagaccaaagacttgggctcccatctggtttgtttcatatcaagacaggctctagattagtctgtttggtgcctctgtttcttgtgagtaaaatttttaagttatgcttgagtcactcattccaagggcagggaatagaacttaacattatagaggtgggctgggctcctgtgtgcggaaagcagaacttaaccattctgtgcatcatgtactgtgcttagctctccaaaacctttccaattttgtgtactaaaacttactttcagaaatctaagcattcagtaaatatggaagcaaagataatattggcttttattaacaccagacatagaagcagtcatgaagcacagagggattgatcatatcctggaacaggctaagtgcaggaataaaagattaaacagtgaaagtgaccccatgggttccttttagtttgcagaagctttttttcctaaccatttttgaaagcaaacaaataaatccaactgtggctttagatgttctgtttcttcattttaaaccttagcttaaggcagctttgctcatcattggggctgctctcagagctgtggaataatagtaagaatctcatttgaaggtttttatgtaatagaaattaaacaagactaatgttgtgtaatggcagaccccaagaaacctgataaaataaacatccaatatcttaactggcctttcagttatatgtgaacaattgtttttttttttctaaaagtcatgaaaatgtgataaagatcattgtaagatcaagttattaagtaaggaatgcaaagtatatatgtatcaaaaaaacctcaatgcctttcaatatttggagagtgcttagaaaacatggaattgaggacatctgtacaagataaacatctcacaaactgggtcactctgggtaagaaggggaaagtcctttggtctatatagactacctcaccttaaagggacaatacagcaataattgttattgaaccagcagtgtctccctaaggtgtctgacattagtgaaccaggagggtattcattcattaactgaattattctcttgcagaagtgcatttaagaatgtgtgagcttgtgggtgaatgctaactactgtctgtttcccatttcttctccatcatcataggatgctctggcaagttgcgatgtgaatggaaatgacttggacccaatgcctcgttatgatgcaagcaatgagaacaagtaagactcagagggcgggctggcatgtggctagccgggagctcagctttctgcttatgccaagggaagtcttctcttcaaaactcttggtaacaaatgatatttaaatcacagcaagaaaaacaggtatcttttcactgaagtttctgagtaagaaagtggggtcatcctcataggaagaaatggctgctgacagagccttggggtggctcagcatctccaaatcttgaagatggaagtgaagatgttagcctctgagataattagttcataacacatttgtttcaagataaatatgctagggggaacaggaaagaacaaaagaataattcccaaagattcacttactgttaaatccaaaatggtgtagttgaggtcacagattgtttgttatatcgtggcacaagagaacacacaaagaattattgccattcatgggctgcatcctctttcctacccctccttcataatcaagaggcctagtttctctttccaattagtgtggtagtttttaacaaaggctagtgtatatccattgggtagcataacctttatcattcttcagtgggtaagtggcaatgatttttcctagttacaaagaccattagcagatattcctgatcactaaaccacagtaattggctccgtcccccttttagttcaaaagtcctctgagaaatcattataatttaggaattttcatgtgactttttcttcacatgtttgggttgggacatctgaagttgcaaaaaagactgctttgaccatttattgtatgctatttgcaatctgctgcttctccctttctccctttctccctcccttccttcctttcttcctttcttccttccttcctctctttctttctttattttgtttgccctttcttccttccttccttccttccttccttccttccttccttccttccttccttcctttctttctttctttctttctttctttctttctttctggtatttgaagacagggtttctctgtgtaacagccctggctgtcctgcctctgcctcccaagtgctggaattaaagacatgcaccaccacggccctgctccactgattttctttagaggaaattttgttagataatacttggttaagtgggtcaataaattcagataaaaccagatgacctggaaaacctttctgttgctttcaccatctacaaagaagtttcaacagagaagctttagaaatatgctatgtgttgatatcaatgaccaagtatatataacaaataaggatctttagtgaaagcattaatatacaaatttatgtatgtagatgtttccagaacttccaaacaaaaagggaaggtgactaagttatagttaatagtcttctgtcagacctagcttttattgtctagattataatgttttatgaattttacgtaaggggttagagtttcaggcaacatgagctgatcaatctatcatccatctatatctatctatcagacatttcacctaattacaaattaacatgaaatgacttaaatcattcaatgtttaaaaatgaactcttagtggtagtgggatataagaactatctgccctttcatatttgctttaaatttaaaattctctaaaaatagtctttaatgcaaggaaaatatactgctagcacttctctatatgcccttctgctcttaggtagcataggcattcccaagaatcaaatggcactccacagaattgtaaaacacagtgaaatgacagattgccaactgtagcattcacaaatgtcattgtcaaactgcacgcatagtaggatgccattaaatggtatcctagtgtttttgttgttgttgttgttatttttgatatcctagttttgtgtatgttcaatcattgaatgtatcagaactgcaataagagggttacttaccttggaagaacctccagtgtgcttatttctcttacaaggacagttataccaattcccgctcacactcttacatgcaaggaatgacaaatgttcaaaacaagaagagaaagccgagaagtgagggaaaatacaaagcagacagagtgttaatcagaatggaaggcgtgtcctattggtcagggtgaaggcacacatgtgactggggaatgaaaggaaagccaccagagagcaggtagaaactgcaatggtaccagtgtgaccacttgtggatcattgtatcttaagatgagagctctgtgtgtactcttgcctgttcagtttatctgatgtgttttgttctgtttaattcacctagagactctaggatagaattgcacgtaagtaagtgccaatcccacatatgctcagcatagtccctaatgtatcaatcatgttggaagagactgtttatcaaaacaagtattacagcaaagctgactgcaatataccttttcactagatttatcacatcaatgtttgcagagagaaaggggaggaaatgtaaaattttcacatcaagttaatgaccaaagtatcctcctttaggatgtgaatgcatggatatgctggggtatggatggtggaccaatggcttgaccactgtagctagttgtgtctaaaattgacccctcagctagttatatctaaatctacctgttgtggatttttgcattgaaatggaaaggtgatgggtgactattagcaaagaggtttctgctataaccatgcttaccaatatgtccatatgtaaaaatgtgttcattgagcattggttttactagtgttttacagactatcttttaaaacttatatgcttaggtatactagtgaaataatatagattactaatggggtgaattagaagaatttcttttaaactctatcatttcctaggacttttgttcatatatctctgggatcttgcttatgctggagcatgccagtttcccaatttgacctactctaacaacttcccattgttcattgagcttagtgggagtttgacatatgataccagcattgttccagatatgtgccagtatttgcagtctttaaaagaaggttttttattgaaatagaattacatcactttttcccttccttttctccctccaggccctccaagataccttccttgaacccctctcagatcaccacccactttcaagttaatagcttttttattattgttattgtgtgtgtgtgtgtgtgtgtgtgtgtgtgttcgttccctcttggctagctaagagcatgtattccagcatttatggttaaaatacctctgctaggtagactatcctgtcatacacaattgatggctatgtcttcaagcatgcatccatgagtagatagccctgcttagatgagggtctcatcacactagagtagatttgtagtagagaagacataacagaacctggctgtctgtggttagctttggatctaattaccctaaactttgctacttaaaaaaataatatgtagaaagtgctcactctaaaaagcagtacagtgtgtaaaatcctaaactaactgcaactatatgttctattcacttttctaattcctcatcatcagttaaaattaaagtgatctcaaaggattgtgaatatgaatatttccaatctaaattaagtattgtgagctctccagggttaaaggttgagctagatgctgctctatctctgaggactggaagctctgacatacccagtctttggtgcagtgtgggttttgttctacttttaaataacttgtttacttatgcactttaattaaagtagaattatgtacccttccctcttcttccaccctcaaaaccatctcgtgtccctgacctcaaatccatggcctccttttctctgattatcattgctgcatatatgtatgtacaaatatataaatattacaagctgagtctgttttgttgtttatatatggtttcagggctgatcattttgtattgaataaccaactaggtgactcatcccagggagagtccagttctccttctcccagcagtcactggttatgtgtaattctttgtttataagtgaacagtttctctccatccatgttaacatgtccactgatatccccgttgttttggtcttgtgtgtgtagccatttctaggagagaatgtttcacagctgacttcctggaattctggctcttttgatatttctgcccctctttcgtaatgtggcctgagccatagatgcgaaggctgtgatgtagctggatctgttggggctggtctctcagtctgtttctctctgaattgtgtctacttgtggtttactgtgatggtctccattgcctgtaacaagacggtactttgatgagggttgtgtgcaggtgataagaagtgggaaatgtggaaatggggtggggggcacccactgagagttggaggaggaagttcaatacaggaggagagacaagggacaaatcataccaaggctgtttgagtaaagcctcagggaatcacattattttataattactcaaattgtatacagtgagtataggtgtatgcatgtacatatgtatatgtgtacatatgatatatattatataccatatatcatatatgctatatcatatatatatatatatatatatatatatatatatatatatatatatattttatcccacttggttgacagtgctccccacaatagccatagactaccaaaaaccgcagtaccaggtaggggaaacctcctttagaatgcttggtcaaggtagtccacatcactctcaagaccatagagactactgatgtagctctgattatctctcagaggctagaggaaagctcctgttgctgaacacaccacagtgttagcacacagtactcagatgactctcagagctggatctaacatgaaagtctccattctgcagtctaatttcaacaggtagcaaaaaatgctatgtaagctgccaagagagagaagcaattaattggatataagatcattaagggggtaatttaagttttttaaaaaatgtcagaataaggaatttgaggcatatgctgtacaatactaccttttttaatcagaccaattggtttgggagtgtatttataattctcgagtacttggctgcatttgttcatttatttttaaataagtatttattaagaccttactttatgaatagatctatagtaattgaatgactataatgatgaaatccatcttgattgttaatagattgacctaggaaaggacttcataagtaaccaatggctcaagggttttcagtaccaatagagaatataaccttaaatgtgtacggatcatctctctcatgccaaagctttgaagtaaaggagaatacttcagaagtacaaaggtgggcagttcctttcctcatcacttcttcagtgcccaaatggtgatatattgaatctacaatattgataataaagaaataacatcataagaagagaccataaaaacctgtcttgtgatccccctttgccttaattcatagtagcttacttgttgcagacttaaaacagagagtgcctccctacaaatgaaacagactcacagtctcctggcatctcatctctctactcctgtttcagtaaatgaattcttgacatctgagttacagcaacccttccctaggttacctcatgttaaatgctctctctggttaagccatcaaaatgtatgtgacaggagatcccactgtatcatattgcaattgctttgccaaaaaaaaaaaaaacaacctagaagctgtagatgacttttcttataggaatagattttattcattttcttctttatcactcatttttaagatttaaccagagtagatagaaatacatttcctctggttctttaatccttcacacctttcccccctggttttaaaaatcttaatatggttcagaaacctctctctctctctctctctctctctctctctctctctctctctctctgtgtgtgtgtgtggtgtgtgtgtgtgtgtgtgtgtgagagagagagagagagagagagagagagagagagagagaccctctttctcatttgtacacagctgttgtgcagagataacattccaaaacaaaggcaatgcatggagattatagaggaaatatactaactcagtaataaaaccccacactgtaagatctgtgaccataccaggttgaagaattattatttcttcataccaggaaattgaccatattatgataaatacttatctataacttgatatgtcagacagaacctaccaaagaaaaggagtgtcattagcaaagttggaatttcttttctacatagtttctaagaagttctttaatatatttgcaaaataacagctcattcataataacattaactgcaaatataattcctagagtagtcaccttcataatgttttacactttttatatacagctgctgtagtctgttgaagctgctataacaatgtgtcatagactgaataatttaaaaaaacagaatttaatacattcttttagagattgggtagttcaagatcaaggcaacagtgaatttagtgtctgcagcaggtccctttcttaagaaaccactttctgtgtgtgttcacattgctaaagggacaagcaaactccttcagacatgtttcataatggtactaattccattcaccttctctgggatattgggctggcctttccaatttctgggacgctagggttctctgcgtcactgaaaaccctaaatctttcagatggcactaacagagatctcctgggaactacgtattctggttcagtatttataatactgcattattggttcccgagagctctgcctatgtctctttatgtcccttgactaaactgcattagccattattaaagagttcagtattctgggataggcttgtgattgactctggtacatgtctgttctttacttagtttgctgtcttgtagagcaaaagaaaaaaggccaaataaatctgaggacaaaagtaattaaatttgagagttgtttaaatggctgcttattctttaatgcaggttgaacaaatatgggaagtggttatctaacctcaaattcctatatagctgttacctgagctataaatattcatcttcataaaaattacattaattattccagagcttgtagtcatgctaatgcaaccttcaaactcctttgttctgctctttgtcaattttgctattttctcctctaggatttggggacttattgtcttgggaccctcagtaacagctttgataaagagtccaattgatgctataggttatgatgaagtttgggtataatttatgtgtaccccatgtactgttgacattaataattgatagttgtttgaatttaaatttcttatttaaattaaagactcacaactttccagggctctaaagcagatggaaattgcagtaagggaagagataagtatcctttttaaataatgaattaagcatttgagcaggttttccaagcaggtgtatttatttatctttcttttttaatctcctccaacctcctcctttgtgtgcctatatttttgtcatttccttccatccagaaatatgtatgatcacagagcacgaggattttgtgagggtgtccttgctaagcactagcaaagagtccaggaattctctaagctgatcagatggcaaatctcatgtgagatactgaagaagaaagccacctgtggagagaagagcccttcctttcatttgctacatgtaaaactaacaactagacctagagcatactgaaagagtatttgaacctcagccttgcagaacgtttactctgctgtcattgagatactctcgagatagtggtttcattttaattcttaccaaatttcttctaggttaaagaacttgttagaattttgtccttagaagccaatagggttgccatatttggggtgtttattaattctgctccaatagaaacttcctattcatatgtgattaagtattaataaatatatatttacttatcagaatgtcagtcagcaaagaagacaggatgatatagaacaaataatatcctgtaggtgatacagaacaaattatattcttttttggtagaggaggctgggtaccagcccaaagcccattgccaccatatctgtaaccttggaggagcatccttctcaaattttcccttgctatctcagtgtttctgttcattttaaactaccaataacctatatacctatggtattctgtttagctgtatttggttactgtgtaagcatagataataaaattagcacattggtattatatctatttaccactcacagcatctcacattcgggatgtgtgcccaaggttagtaagtggcaggcagactttgagttcattcatactcacaccatgtatttaccaacatagcccaattagtcagtagattagaagctgatgtctaggttgatcacaacattctagagctatcatgaccagaatggagcattgtgttcactgagtacttcttggtacgcagagttctacctcttcaaagagtaggagtgtatctgcaaagatctctaatgtcacatggatcacaatggcttgaaacagcagcaaagattttttatttcaataaacaatatataaacctggttcccacaatgctattaactcagttgaaataaatgaagggcaccctagtgaggccataggatgtttattcagagggtgtagagggttaactactgtgtcttgcagacagtcaaagacagatgcaacactagaaaagctgtataattggagggaaaggaaggaaggagagaaagaggagggctggaaaaataagacagggaaatgaaacaggcaggttagaaagctggctggctttatattagatgtgattgattggatagtgtcaaggtgaatctggagctttaatctgtccattttcaaaaaaaaatattactaatacatattaacagcttttaaaagtgaaacttaatgagtaccagataatcacaattcaagtaaaaggtttctaaaaaacatgtgaacatgctatacctatgaatgctaatctagttactagaatttatatgaagtaagtgttccaggtctggagaaatagcttaacagttaagaacacagatagttcttccagaggacccagatttgattcccaggacccacactgctgctcacaaccatctgtaatccagtcctaatgtatccaatgcccttgcctgacctctttgagtaccaagcacatgttgcacagatgtacataaagacaaaaatatcgatatactaaaagctttaaatattaattttaaaaaataagtaccaaaataaagtgtcgatctaagttttcgggggaaaggtcattggttcattttcacattgctttatgtcagtggttctcaaccttcttaatgctgtgaccctttactacagttcctgattttgtggtgaccccaaccataaaattattttcattgctacttcataactgtaattttatgtaatgttatgaattgtgagtatctgtgttttccactgatcttaagtaattcctgtgaaagggtcatttgactccaaaggggttgaacgccacatgttgagaaccactctggagttcagactctgagggtagaatcacatgcgataaaagccactgacccatgtttttgcacctgagtgaagagctttgtgagtgctctgcaaatgtgggctgtgaatgaaaagtcctctgtagaagacctggcccaggggaacctgggaatgagagatttttctcttccttagaaaggagtgataccctaaggttcccctatggagaataggaagagtttcctttgcgtgtatgtcattgacccgttccaagggataagagcatgacaggctcacttgagtcccctcttgtctgctttcaccccaagctgccatctcatgaattttagaagtgacctttgttacaatagtttacctccttctatttttggatacccatatcccatctgcatataatttacatatgctagtatatgcatttgaatttgcatgaattacggataaaattccttgtggtgacatctcgagctgagattcgctgactgctccgggttttgtgcaaccttcttgcttctggttggcattttctccttcagaagttcatcctcacaggagcacacccctcccacacctgtcccaattaccaaatatagaatcctattttctccccagtcctccagctccgatgggtcaggttgttgtgcttgccttctatccctttctttttccatcctcctgatatcaggatcttcccatagacactactattgttttgtcatcatgccaaaagaggagcacatgttggtctctagcattcaacccagtcttgacaccagccacttgataccaatacaaagtgacctcatttgaacttgctttaggcagtggtttagattatgacctgaattgttactgaatgtcagacacaaagtttactatatttatgttccctattagagttatgacagatggaaggctttaataaagccttccaaagaactgggaaatatttcatcttggagttgaaacaagcacctttgcttttcatcctatttcttatctacctgtctaatgtatcataatgggaaaagttgagcaatggagtggaagagatcaatgaattgagggacttgaatttcctaaatttaattcagagggaagcatgaggacccaagtgagggacacagtagggaatagctctagtaagaatcatgcatttccttctggcccacaccgaagcccaccaggaagcaggtgggacactcaaggcccctggtgacattgtaagagtgtaacagcaaatatgtatttgtatgcatgccattcatattgttaaaatctttatggcccaaatgcaaatagaggagctatttgggaaagctgtttcaaattatattggtattctatattccgtatctgttcatcggtgccttttttttaatatcaatccattctacttatgttcttctggtgttttgcttgtgcttctttgagaatctgcactgtaaaacctatttcaattataagggatactaactcatgcttaattcatcccggttgaaaaagaagagccattactctccatatatctgtcaagacttgctttttccttgtctttagagagatgttaggctaagaaagaagtttgttaggaatgttactcatatcttaagctcacataatgtttttcttaaatgatttatgggtttctgagattcatagagacagtacatatttctaagacatatatttgaagtgaaaaagaaaaaaaagtgcttgtgggtgagaggggcccaagtaattcctaggtaaattgcactgaaaaaaattgtaatccttctgtacatcaacagactacattaaaatataccctcaaaaaaaaggcctgtgctgaaacatgggcaaataggctgatatttgaagttagctgtgtcattataaattttttttagaacttaatgtacatacatttctcattaaattgtcctgtgagcatgtctgtagccccggtaagtttgatgtgtgatttgaatgtagtagaggataacactgtcccctaaagtgaaatctagcaagttcatcatgtgtttttcatgggagaatgagaaaaaagaacaaagccttggtactctctaacagcattagtctgactaacacttcttggatgtatctcacctattcaagtacataagcgctgtctatgacaaaaatggcttatagttcacaaatgatctatagtttataaagcacttttacatatattctcctatccattaaaaagtcatgtctatgggcagactagactcatatacattgcttgcacacacacacacacacacacacacacacacacacaaacacacaccagtatcttaattgtgttctatgcatgatgagttttctgatggtgagtcttggtggaggccaaagattccttgggtatgattactgaaaatgctgcaaactgcatatttacacaggcttcccgtgctgtagcctagggtgctccatgtcaactgcattttaaaaatcaataacacctatctgctattagcttaccatctcacctgaaaatatcaaatttgaaccggtacaaaaatcttacccattttgaccaggaatattctacacacagagctgtcttttgaatgtaaatatttaaaaattgtataaaatgaccattaggctttgaaggtaagacaagtacatgttgtgtttagacttgggtctcatcccccaagtgtctccttataaatgcagatattcaaaactccaaagtctcacttcttggttttaaggattgcagatgacagcactcaaaggtgttttagcatcatgggccatgtaagcatgcactcatttgaggagttgttattgctcatttcttctttttgtctcctctctgtttctattcatttccatctctatcatgtctcattgtgtttttcttgtttgaggaaaatggtttatagttacaaatggtccgtagtttacatagcactcacctccaccttgctggtatcccaaacaattttcttttcaataaactaattgtctgcctaactcactcattccaagacaccagaattttaaaaattatacgtgttttcttgtaagagagtaaaattgaaagtaaattcatatcatttatgtttttgtcactaaattcatgttcctgtatctcatgagacagcctaactcagaggagctactagatgcaatttctaaacatagtcttcataagtaaaagtaattcatgcaacaattgtagttagtttatgaaaataagtgtagtgcttgtaaataatagacaatttttaattcatgagagcaattatagttcagttatgagaacttaatgcttatttttgtaggttgctatttccttctgaaaagaattactttttggtaagcctaagtccatatcactactttggtgatatgtatgtattattatgtatgtattatgtatgtatgtatgtatgtggttttccagacagtttttgtgtgtaacattcctggctgtcctggaacccactttatagaccaggctggccttaatctcactgagatctgcctgcctctgcctcccaagtgctggaattggaggggtgtgccaccactgcccagctatattttaaaaatgaaactactattcaagtggtggtggtgcatacctttactaccaagcactcgggaagcagaggcaggaagatctcagagtttgaggacagcctggtatacacagtagaattttttactacacagtagtaaaatcctgtctagaaacaacaaaagtgaaattgctgatatatttatactaattgttattctactaatgcaatacagtgaaaagtcactggtcagaatgtgaggtggaaagctttggctttccgcttcttcagggacctataccggcatgtcttgaaattaggcctcagattgttgagggttagatgggacaggtgtgacaccctcttcctcagccaaattgtccctttaaaagcataccctacttcagggtctatttttaaacctttacgacatagtgaaatttctcttagaatttgttcttgaagtaaaagttttccttatacaacaataacaacaacaaatcattgtaaactcagcattagtatccctaagaatgtggtgtagaggaattgaactacaaagtaaatggagagactatgcaagtgttagcaattaacacccatcttgaaaaatgcctgatgggagcaaatggctagtaatgagaccatgtccttaatgattgacagtgcctaattaacagtgagattcctactggcttcctgatgacatggtctttcttagtcagttgggctggctctctctctctctctctctctctctctctctctctctctctctttctctctctctctctctcgttttttccttctttatttttaaaggcaaaggaagtttctttctttccttggaatgtggcctttatctggaactcacatctgagaatgttgtccctctgtcttcagggtattagtcagctttgtatcaccatgacaaaatagcagaagtaatagcagattaggtgaaggaaagatctgtttgggctgatggccctgtggtttcaatggtttccatggttgctgggcctgttgtgtcaagcctgtggcaacgcagtggcacaatcatgtgatggaggagatcttactcacctgacgatggccaggaagtagaaagaatgaaattcctgtatctttcagtggcacacctccaatcccccaactcccttctgggagtacccagctcctaaaggttccactgcttcacaatagctgatgactcatccttcaacatgcacccttggggacacttaagatctaaacagactcttcctgatgaattccaagttcttcagaaatatggaatatgttcagtgcccttttagcctctccacttaatccttcctagattaactctaattttaactagggttgcccctgttatggccaatgaaaagcagtagtatgctttctttcctactgtggattgataaataatcactttatactgagtattcttatcttgctatgcttacgtgctcctgaatgtgctatcagcttggtgtatgctgttgattctattaatttagttcagtactatggtatccctgcccgagagtagcataactgcctactcatccttcacttgagaaaataagagaaaaaaggaggcaataaaatgtaaggtctttacatttaatggtaaatgtctaaagtccacgagagaagcaagttttacatggacattactttagtcttactgagttattgtgccaaagtgccttgatttctttcttttttttcctttttcctttgcttagtttgtgtttatcttaaataactataaatggatgaacttagtaacagaaaaagtcttccgtgaatattaagtgcttatttgttgcatggatttccctagctagagtcaagaagctgcccaccctctgatgggcaactttctccactttattcaggttcatagatagtatcaaacacacttggtcagtttgtggtgatcttgtgaggtctgtgacagtggtgtggaacaatagcctgccctgtctgttccttgagtatacctgctcagaaggagcacgggtaagagctgcagatgggttggatggcggcagatcatgaggttttaaactcttctagtttcctgtgtttctctattactaacaggcaaactagtagacataaaaaatgctataaagctttgcaagcccaaaccaaacgaaattccagcatgaggagggcagttgggtgcatagttccatccctagataaagagctgttggtaaatcttctctgctagagaaggctcagttgtctctagattgataaaccaaccatattgacctgggaaggcacacatccaagaatatttgggcagcacaattggccttgattggggatgggggaaataagggcacaaagttgggtgggaagggaaggggaatactctgtgaaaaggggggagaaaggaggagaggaatatgattaaattatgtcaaattctcaaataagaaaatattaaaatcaagcaaaaaagaaattcatcttatttcagatatgaaggctgactctcatttagactctgaaaacaaagactacagagtacacagaaagaaaatgttggaagttacctggggctgtgtttgtttgtattgattgattcctattcctagctggctgaaatgaaattaggaattaattaagctttgattttgagggagtttggtttctggtattatgtgctggccttgtttcaagtaaaggaagcaaattggggacataagcttttaaaaatgttttcagaacttttggatgaaaaaaatgaacagttatagttgctgattagtacaattttaaagaaatgcattaattatcatgctattctgattttaattattaactatatagaccgagttgaagtggtgtccttagtaaaaacaaacaaaccaagagcaaatcaacattaacattacctgtaactgttactttaacaatttaacatcttaaaagatagaaataataatgacaaatgacttccatatactcaaaatgatagttcttaaggcccaacgtttctacgtcttttactattgtgaagatactagtcttgatgaggtatgaaagagatcatatttcagaattgaggttacaagctagaaacaagaaaatgtatttcaatgggacaaatgtgaacctgaaaatgtgatatggagtagctggagaaatggctcggttgttcagagccactgttcttctagactcgtttgattcccagaatctatactagatgactaacaaccacttgcaactccagctccaagggatcagacaccttcttaatggcatccaaaggcacatgtgtgtgcacgtgcacgcatgtgtgcgcgtgcgcgcgtgcacgcgcatgtgcacacacacacacacacacacacacacacacacaaatatgatagagaaataaattcaaactttgtagagactactctaagcaagtccttatggctgtggtcacttacctgattcctatatataaaataaagagaaaatagttgtttgcaatttgttgtgagattcatatagtgccttcagaatattcagtgtcccaaatgcctacaccccatgcacgaacccctgggattggaactaacttagaggtttagcaccaggaaattcatgaaaattcaagctaagtcaatcgttgatggttgttaatctgatgtgagaatttttttccacctgatttgaaatatttctattttaaataagtactgattatcataagttggggccaacttactttaattttttatttcagttgtgcagaaatgagaggaagtggccttacaagtctctttgaagtctggattgtcctaagagctatgatcattatctccattttataacatctggttgttcagtgggcttttctaatcttgatagttgagtttcaaaacaaaaaacaaaaaactttagtgttcttctgattcccaaagagggtaaactttatgccttctctggagtcatcacatccctcccaccatgctttgctaagaggatacatgagcaaatgtgatcataaatattgaaaagagttcttatatttggaacttccatattttatttaaaaacatatttgttggatttgtagcagtttgttcttcaaaggatgatcaacaaccgcataccctttattgtagctgagaggatatgcagccatgaaacagagaagctgttggtgtagacagtgctgtgggagtgacagtagtccccactgcccattctggttgcaagaagaaatttaaaaagtgattacttcaacatccttattcaaaaatttgatctaccttgttttcactcgttggtgactggtttccatggaaatggaaatggaataagcatttcttgttttagattctcagctgtcccatgccaactgagagctgtaaatgccatttggttaacagcaaggatccagaatccttccattttaaagtgacagagggagaggaaaagaaaatgcttgccaagtcatttcacttctctgtctttgaacataataccattttacgattgtctgaaccattgactgatgactatcagacatacacaaagtctagcaacgtctctcctgagtaacggatctgatactcttccacctttcctgctgtcgtttaactagtgtggatgatcttcctggttccccacctgctgtgcctggggtgggcagtggaaaccaggatgatcaaattgttgaaaggagacaatttaatgatctccatgacccacagcctgaggggaaaaaagtcacattaaaggaacttgggggactgaaaaaactccttgcttttggtagaatgttggttattttgtcatcaggattttccatttctgagataactgttcgtagttactatattttctacaactcttcaacagagaagaatgttgaaaactagaaataaatgctttaactaagatggttaagcatcaaaacagttttttgtcttgctttatgactcaacagttgattcaatgtgcatactataataaaactgtattcgcattaatgtataagcattctttaaaatttgttggcatactagattataaagtaatgcaagtctagttattaaatatactgagtgcaggtctatgaacacatagcttctcatgaaagttataaaggaatttctcatgtgtccatgtgttcccttaaggaagaaaactaaatgtaattgctttcaaccattgatttccatgtcttttaagtgtgatcttacacctagccaagaagcaagcagtgtgccaaacaagatccttaaatgctagaccgagtgaactgcgtgagcattctgggggaaatctcagtggtgctgggcatgttgcttagggccgggtattttccatggtcacattatgtttatgggaactgttactttgaaaactgttttggtgcagacaatcatgccttttagtgactggaaaaagaaacatttaggatgtagccagagatttgcatagaatatcttatgcaagtcaagggagcaagccagttcccattgtaagtattgtattagccatcattatttctaccttttcaagagagaataacaagttccagattttaagtcacagctcgtctggtttggagagccgttgtaggaatgattatgcgtaatacggtcagcaacatgtctcatcagagtggccgagcctgtcactgtctaatgtaatctgcaggttttctggacagtaaatggatctaacctctgggtagcagagcagtagctgttaattcagcacctactctaataagctgcttttgatccagcctgtagtgcatccagccaggaacctgctgcccgaatttgatccaatcactgattggatccatcctgtggttaacatacttagtggctgattcagtcactgcttagtctcctttgagctttgatgtgatctgtatttgatccacctagggcagaatccaaatcgacatttcttcaataagtagcaaacccaaccgtatgatgtaatcagtgcccaatctaattaaagacagcctttgatccagccattggctgattcaaagaaaggaatctattgaaatggaggccagcatcttacttaatgagtaaacagcagtttgtttgaacaatgaaaatgagattatgaaactgcaagtattgtattatctaacagcaagtagtcatcgtcactcttacatcagtcagaaatgaatcatgcttggagtttttctgaaatatcattaaatgtgaattttaatagggtcacaagcagactcagtttgtaaaagtcattatcaactgttccgaggaccatctgggattgttttattgacaaggccttctcaaggccacaatcgcagtgccatttttgctgatttccctccccttgtttttaccaagctctccttctgagtcccctttcaagacagttttgtgtgtggttaccgagcaggacacagctgtcactcatgtacgaaatgccatgttttgtgaaagttcattaaacaatttggttggcttgctttgcctcatgttgtttgtatgttcctggagctgtggtgttctgccctgggaaggaaaggatgctggagtccgcattggcattcttttctgttctttcattttcacccttgatgagggaaatgagccctgtctctcacacaagctaagctctgactctgtcactgaacctagtgacagtattcttaagtagacccttcctgtttagaaaacccagtaattatggtacctgaatgaacctctgggtagctgtccaaagaccttcaaggacacaccatgtctccagaatggtctgaaatcaccatcattttgttctagccctgacaaatgtggacaagccaggggacccattcatgttccacctgaatactctgtattttattgttgtggaaaccttaggacttgtaagattagaattcaagaactttcaatacaagttaattgtattcatttggggtagtcccttaagccagaaaaatcagtttccctacctaaaatttggagaaaaaatacatataatacaagatcgtgggggaaaacagataaattaaacatgaggaaatctaagaaacaacctgataaattatataagggaattttactactctccttgatttttatatctaaattgtaagttgtaaggtttctctctaccttgagctcaaatgttttctatgtggctggaagccaacaagcccagagatactgtagtctccattaaccacagagctggtgtataggtgtgcactgtcactacctgacttgttacatggtgtagggatctggactccagccctccctcgtttggtagtgctctcaacccctgagctctctagttcatggataatagtgacatttaccgaaggtatcaacttatgtaaaactgtattcagtatcaatgaaagaggtagaaaaggtggaagcgtgtatggtttctggccctaagaagactaactttacttccaccatgcctagaaacaaagcctttaattcaaatggactgaggctcatctaactgagaatgattttcacattttcagaaggaaaaatgaaaagaaaaagtgccaaggcttcatgttgccacataaagccaagctcattaccaacagtgtttatcaattcatgtccttgcactcatgcaaataccatcataataaaagcctatcccatatgttattttaacacagtgtgcactctatacattaaattgtcaaattgacaattagaaattatgatttctccttaaagaagtttttttttttttctacttgttgagttagtacttctataatgttaaaaaccttctggtatgtgtgaggatgtcatgaagtttgcaaagggagccagggctgtaattggtaaatcaagtctggtgttctcttggtgttgctaagctgaaaggattgcgtgatagttgagttactataaggcatcaggatttttttttagctatgcgttaactttcatccagattgcaagatgactctggtactcctcagacttgaaaagtctggagtgtcttgcagaaggaatttgataacactaaaagagcctttagactgcaactcagtgcctcttttacctgtattttggataaatggggatatagcatagtcacagattttcaatgcttatttcttggaaagtaaaacttctgtcttcagtagtttgtcagtgtgcccatagtcaggaagcagtctccatccaagtgggatcagatatttatgccacctctcttcgccagctcttaacatatttaaaatgtatttagcctattttacagtaagtattgaatgatacacttatctaaatatagtaacaaaagctaatagaaatggatccattaaatatattgttaaatgaagacaggtgtgtacattattaagatttcttggccatgaaaactcattgacactacatcatatcacgtgtgattctcacctttggatccttagtgacaaacacacccttcagttcttggtttattctcactactgaagggatgatttggaaaacttaattagctggaagtcacgggagtagtttcatttgtttcagttaagtcattacagcaatagccgtaaactgtttacagtgtacaggtaaaggtgaaatattgtctattttgagtacattgtagcaccctggtgtaatgctttgctatttaagacatttatataatgcgacctttctgtgaacatacaaagaatggagagagagatagaaaaagtccacaatggaatgaaaatcataatttgatgcaggccgttgtttctttccttacctctgtgggccttttcccagtctcttggcatatacattcagtatacacctccatacttcatgcattactgagtcctaattaggaaattttcttctaattatgataacatgaaattatagaaaaatcagcctaggtggcaaaggggaggccattcagtctgcatactgagcattttcatggacaccaaccccaaactagaacaaccggagcagaaattctgagagcgctttgctcctaaaccttaattagcatgtaccacaatacttgataattatttgcataaaactggcaaccctatgccactggtcttagcttcaattagtcaaactcatagagctcattaggctccagaggaaatttttttctgttttcttagaatagacaaatgaatggcagtgtgacagtatccaatgcatttcttttttttctttaacgtgtgtgtttgcctgtgtgttgtgtgtgtgcgtgtgtgtgtgtgtgtgtgtgtgtgtgtgtgtgtgtgtgtgtgtgtgtgtgtgtgtgagggggtgtatgtagaggccagaaattgcagttgaatatcttcctcagttgcttctccacctaatttgttttacatggggtttctcactgaccctgggcctcactgattcagctagaccagcttgttccccaccttcctagcactgggattgcaggaaccactgccaagcaggttgccttttctgtgggtactggggacccaaactggggtcctcatacttaaatggtgatcgctttaccacctgagacttcttgctgcctcctagcaccctagcaacccctggcctccaagctcccaaaccctcatcactcccaaccctctagcccccagtctaccagccccattagtcccccagtcatacccaatgctcctagcactgagttattttcctctttaatgatgtactaccgatgcctgtcaagtgatacttgggtatgagaatcactttgcttaggaaaaaatctatgaatatgtagcttccagggccatgagaggaaggggatatccatttcctgagtctagtctcggaagctcaaagcaaagacttaacatgtgtttgcctccctggccataaatctctcagttcatggtaattcaagcaaccatgttttggtgttgatttggtttttgagatggattcttgctataagcctaggctgggcatgaatttgtgatcctaagtctcagacatgcatgtgctgcaattatggcactatactgtttctttctttttagatagtgttgtttgctagttagtatcctactttcatcagatatcagccataatatctggaaagttcagccacaataacttttcataggttatgttaatcacaagagaaccggaaggagaagggagggcctaatattattgttcagtaaaatatccttccaggggtgctttggcaatttccaacaaaggattccgagaagtttgtagtttacttggaggagttaaaactgagtgtggtggtgtgcgcttgtgacttcacattcaggaggctaagggaagaagattgtgagctcaactctagcttaagtgacattctgagttttggatcttcctaggctacagagtgagacgtttcaaaggacaaaaacaaacaaaacaaaactaaagggatgggggagaacagaaagggaaggaggtatggagagaagcaggttttccccttctgttttcttgggttggagataatgtttatttctgtaacacaaacaaatatacaggggacaaaactgagggcgtcttagaccttccaaggaaatgttggaccctccagatctacattagtgaactttaaaataaaataaaaaaaaaaaaccttgattcttagctcacagagaacagacctaaaatcaatcatcagaaatgagtaatttctatctattcatagtcaagaggtacataagacagtttcttcttcctctgtttatggtagaaaatgacattaagttgtttataaagctctagtttcaccaggtggaggtggcgcatgcctatagttccagcactcgggagggagaggcaggtggatctctgtgagttctaacccagcctgatctacaagagctagttccaggacagcctccaaagccacagagaaaccctgtctcgaaaaaacataaacaacaaaaaagctctagttacatggaataaaaactagtagattggtatttaaaagaacactaaaggtaactctctggtaagaggttagaggttaggagaggttggaaaacagggctttagatagctttttagcttcagagggaagggagcatcaagaggttacaagtacatgtggacaagcatagaaaccaagttaagtgccacatggaaaactgatcatttaaagccaagggggaagccaaaaactgtaacaggtgcaagtctggagtattaaacaggcagccaagccaagggcctgtccccttgtcctgattagtatattagatatactctaaatggcagtgattagtggggagaaaagatagataaagaagagctgtcgtggtcagtgctgcgtgcacatgtccttgtgtgcctatgtggagtttttgttatattttgtcagtttatgaaacatgtttgagaaaaaaacagaagctggcaaaaaaaggggatgttctgagaaacaaaagaatttctttattctttagatatggactagaggggtgagtttttcatgactttcatgaagttaacaaaaattgaattactttactcagctatgaatgataaagggaggaggggaaagtgccataggtctaggcttatgttttaagataatgtggttgtcaaaaataatgttgtcagatattcctatcatctgtctggcacagcatcagctatagtcagaaaggaggagagtgggcaagcaaatgataaaatcttggtctccattcagaatctgaggaatgtgggcccaaaggtcaagattggccagggtcctaaaagccatagtaacacatccaggacactgtactgctttttgtccccctacgtttcaaacagtccattgactatctgccatgataatcattctcattggttaaagtaagagaaatcctgtctgctttgcctacttggcaagtttagtgtgacattcagaatgagtataatataaatacagtattatcacatatgacaagaaaaatcaagaccatcacttttgaactgtttgttggggaacgtttccttctatgttgctgcctcttccccctctaaaacggcttttttgaaatacgtgattttctctaagatttatacaaagcaaacatcctcaagaaagaatgggcatgctagatgtcaaacgggaagcatactggtggcaattggcagaatccgtggacagttggagatacttatggcaggagaggaaggaaaacagcaagcatttagccacttgcttatggtggattcctacacatgtaactttctcctccatgagatgtgatggcatgtgaggaagacctccaaggacatcctgatctctggccctttgctgagtttattcacatcttactgtagatctgtgcaagccccagtaagttaggatttctaactcagctagctccagtggagagaatgaaattgactcagcagtgtgctgaatggacaaggcatgagggaaggaagggacaattacttctaatcacagcttatctgtgagttaagttgtacacccacctcacctcattttatgtgctcacaatatataagcattaattagcagatgtcggcatgtgagtttccaacttttcagtaaaagaacccaatagaaatgccttgaccctttaattacattggatttttgtaaagaactgggtgtaatagatgataaaactcagtaagaaagattagtagaccaaagattaatatggcttttctgtcaagactattttgagtttaaattctctattgagggaaaattgtttcatacttgccagcatcctgaaaatattccagaggaacgatgattaaacaacacctttaaagtgttagtatgtccatgtttgatttattttttaatgtccaggtttttttaagtcaatgatgttcagatccattataatgggtgaaactggtttagtttttcagaagtttcacagggcctgatttctaaggagttcccactacatgtaacttggagtaaagttcttatttaggtgttctttgtgctacagtgtaatagtcaggatattttctagtctaaagtttctttcactatactaaaaacactctaatgcacatattctggtctttgaatcaaactacatctacgtcagagagacagacttgtgtctctgactttggtgtttaactgacatgacattatccaagctgcccacccctgttcttttctgagacttgctcacacacttgaacttcaaaccagtcatgatggtaattatttccctatgattctttgtaaatccatgtcaaaatactgagtctgactaagatgtaaaagtaaaaagatcactggtattttgtggggtaacgatcattgtcatccaaagcctgtaggtcgtttaaatgtagtttagctaattatttgcaccgtcagtgacattatgcagtggtatattatctaactgatattttcaatgggaggaagaagaaaaagggggtttgcctctgatagtttcagcatttcataaaaatggcttatgttttactatgaagaataacaccaagaagtttttataagaaacgattgtaaggaaaaaaatcaactgagaccgtgttctgtgcattaaacatgtgtgcaattgagggattcagaaccaagctaataattccatttttaaatggtgtggggaaagcagacattcaatattatagctcctagtaaattacctccaaatttcccaggaaaatattaaataactttgtggatgactaagctagttggacaccatgagaatttctctgggaagatacaaatacataaaagtgactgggcacatgcttgtcttgattgagcaaccagctctagcccatatgggagatgtatttcaggaaaccagggagtgctgacaaagatggtacatggtctaatggggcaagaaaaagaattcttgtataaaatgaaaccttgagatactgtctccatcatcttaagagggaaagaagtatctacagtgaaccagacagtttgttggactttgtcaactaggtagcaggtaacacaagaaaataaaagagtatataatctatcttttaagaacttagagtcataattcatactgtttgtgttggttgatcaccaaataactgcagaaagagattaaagttttttttggaggaattagctttccccatgagccccagagactgcacaaagataaaattgcaggcaatgtgaccccatgcctggaacaacatttggcaagtggcaccctaaaatcatttagcaacaagcatgatgatttaattggattttagtattttataattcttatatttaatttacatgagtaaagaaagggatatcaaaaggtgttgagaaagattatcagaatcaactaagctggttatagtttagagaataaaatgaactttaaaaagtaaaacagagatgaagtgaatgcaccttgaatggattagatagtaaattcggcatggctgaagataagatagttgggatagaaaagggacagacttatacaggatgcaacacataatgagagaactgtgaggtcttagatatatatatatatatatatatatatatatatgtgtgtgtgtgtgtgtgtgtgtgtgtgtgtgtgtgtgtgtgtgtgtgtgtgtgtgtgtgtgtgtatcattgaccctacaaagagaaaattagggagagtggtgagaagacagctttagagacaatagctaggaattctgcagaattcaacattgccagtgtaagaattctacaaaacattttgtaaggcatttctcagaaaaaaatctgcaaagagcacagaaagagattatataaccagtagccagtgcgtgacagtgaactgatgtgtgtaaggtggtggtagtccagaattcctggatggcctaattgctttcattaacaagttgtttatttctggagccaacaaaaaattctgagctggatatcaaagataccgaaagagcatacaaattacaaggggggttaaagcaaagaatgtgcttatgtctcagtgtaatttctagggttaaaaaagatccaaggagtgactctcattatgtgtatctcatgatatggcgatgagacatgggcaactcaagtaagacactctacagtgtgtgctgtttgtgtaaagaagaaaatggtattaatgatttacgtagcatgctgttcagtttttatgactgaattcattctaacacaatgaaaataacagaactggacatgaatgtgtcggtaagcagttacactaaatgggcttccccctaggcaaagatatctcggttttgttttgtttaaaaaaagtatctcaagtttgcactcccaccagcaatggaggagtgttgcccttgttgcacatcctctccagcctgagctgtcattgtaagaataacataacttgaggaactattgagcacgcacctaatgaacactcaaacgtaacaactcaaggttcaagaagaaattatcagttgtgtttgggattcacacaaaaaggaattgttcttttaatacttaaaagtttttctaataattaaagtgatataacccaggcctgtgcgatggctcagcaaataaatggacttgatgcagaagacagtagacctcagttagatcccagaagcctacgtaaaggtagatgggcaaaaacaagtacacaaatgtctctgacctctgcacatgtcctatggcacaaatactcctaaacacaccacacacacacacacacacacacacacacacacaccacagtcatatattattagagaaggataactatgagtccaccaaaaattaaatactgggtgtgacagcctaaaatttccttcggtgaacaacacttctaaaatgtgcatttttacaacagatataacaggaaaggcagtgagaactttgaactagtgtttcagaaaatctgttcatagaacaagcagaagtaatgaatgagtagttccactgatattccacagcaaatgttgtcaaggtaaagaatcaaaaattagatactttttatgtcatatgagcaaagataagagattgaaaaactgatacacaagggtttatacaaatattttctccatttttcataatgatgttcaactttgcttattatctctccctcccttttttccctcccctttttctcccactttctctctggtacatacattacatgtatacactgtagacatactggcatttaggtgtgtttgtgtgtgtgtgtgtgtgtgtgtgtgtgtgtgtgtgtgtgtgtgtgtgtgtgtgtgtgtgtaatctggaggtattattgttttgagccagtctcccattggatgcaaaatgtatggattcatctagaatggctgggtagcaaactccagggatctgcctcacaagcatatgctactgtccttgacttttctacacaggcactggggatgagctcaggtctttgtgcttgcatagcaagccctttagtaactgagccatctctacaaccctacaccaatattgttaaaggcatgttgttttcatatactttagttacatttttccaggttgttatctgtttctgtctactgtactcttttcatccagtaattctacttcttgtaacttatcttcagttaataaattatatacatatgcatatatataagctcaaaattgctgatcacattcttatttacattagtaaaaacctggataacagtctggggattaaagatataataaaagaatttataagtgtatatgggtgtacatatagctgaataagtataaaaaatcacacattatttatactgacacatgaagaataatccagtgtaaaatagtagccactaacatatccagattaatgcttgtatagaaatatctactaagtgaaaagagcaatatggagtatctcttttagcaaacatacctccatgcctataagttgtttacgcgggagagacattcattctacatcatgacaagtacatctgacatgacatggcagatgtaatataaagtgaaaaagcagtggagtgggatttccaagactgagaactagtaacttgggggctttcttctctttccacagatgtcctcacatctcaaatgcctgtaggtgttctcatctctgtaatgaaggcagaaatgggtaccagacatcacactcacaccatagacagcgttgtcacctcttttcctcaaccatggcaggcattagtcctgttttagtgtttttcctctgagctcagtggtgatgtagcaattgtctcaatattacattctaagccatgatgtgaacactctgttctttatacttgaacttcctctactgctcttggacaaggtgatggaaggtctttcagccagaagatttttgtgtttttcaattggattaatatattcactgtgcacatttcttggccttataaggatatttttattctggtatataatgtcttttgagcatatttcctccatacaccttcctttcctcccttaagtccccttctattctcatgtcagttatacatgcgtaggtttgggcatgcatgtatcatctagcacccacaaataaaagcatgaagtatttgtcttttaaaagctaacttgattcactctgtgtgacaatctcctgttgcatcattttcttccaaataatgcctttgtttcagccagaagatatttctaaggagcgttgctgtgggaaaagaataacagggaattcttatttaaaaaattaacccaaaccttcttttctaatgaccacatttttaaaaaccataagaaaatgaaaaggaacaaatgaactaagtcttgacatgcctcaataacttacatacaattggtttaaagcaattatcaagatatatattttatgcaatgtctttgcgatttgatagtttatggcagtttagataataaatttacactggaattacttggtctgtatttaagtatacggtttataaagcagacaattataattataaaagaaaagatcatatatttgagaacaagttgaagggacacagaagttgggggaagagagaagggagtagaaattgggaaaatgtaagtatagtatgtatatatgaaattcgcagaaaactaaataatgaagttaaaaagagcaattttttatgtccatagttgaaatatttcttattagtcttttaagtttattcagaattaaataaaattaaaacttgagatgatatttctgtagccatatattaggtatctaataaccacctgttccctgtggcttgttagagagtacaagctaaatggtccccaccattcatatggttcagtttcagccgttagggtgattttctacttaggcaaccaagatatcaaaaactaaatatcttcaaaatacaacccaaaatcgcatgatgaattgctaaataatttgccacagacaagctgagtgctacttgggtaggaagttcttgaaacacccacagctggatactttcttcaccactttggctgtgacacatagaactggtgagaacagagtatcttactttagaaaccgtgtctgttctactgcaggcatgggacccgttgtgctggagaagtggcagccgctgcaaacaactctcactgcaccgttggaattgctttcaacgccaagattggaggtatgggacacttccaaggatacacataggagccaggaagctcttggctgactgcttttcaaaatccttttcaaactagtggtgggcatgtctatgcatgacagggagcaactgctgctgactacataggaaccatgtgaatgatgatattcagtatggtgatggacacttgctataagacccccaatatgtcacaaatatagttcttctaaatacacttaggcaaaaaaaagaaaaaatacgctcacctatactcaactcaggcataggtatatttattataaagatgtagccaacacggtatgaatctgaaaaagtggactccaactttgccacttgtaatcattgttgtaagcaacagatgattgctacagccacacacaaatggaagacagcattctaatagaccctagtgacttcatcattatacccgaggatgtcccctaggtaggctaaagggtgtcagagaaccacaaacttcagcaaccaggtgagtaccttgttccaataccctatttgctaccaaatagttcatctcaaataaaaaagtgacattcctatccgcaataagagtgtgaaacatttaaacattaatagtcgtgccttctccatgactcccagtggctacctcaagtggacagttcccttcatagatagctttgttttgtcttgtaaatgtctgtggtcatttatcagccaaactgagcctagtgaaaggctaacgatatccaacaagatggacctattataacaaactacattaagaaaggttgcttgaaacatgaattgtttatttctagaattcccgatgtcgtatttttggggcccagttgaacaaaggtaactgatatcagcaaaaacaaagctacagttggaggaaccatggtggggctgtgcttaaagcaggttcctgagattcccttgactgccagcaatgccaaaatatgtctgagtgctttatttgctttctttcacccttaatttctgggatggacagtttgttgcccaataaatagctgcactcaggagcatccactgtgataaggacagaggctcttcttgaggtgtgataagaatgatggagcgcccccctcccccgttcacccagcacaatcagatccaagctacttcaacagtcacctctcacatatgtgcttatgtcctcgattgctgtgatttgattatattcccagaaatagagactgacccagcactctgactgaccctgagggaagaactgaataaattctgagctctctcatagctgctgaccaagcttaactatacttccttaaaaagataaatgtatggcgataattcaataaatgacctaaataggaatattctgaactagaatttgactcctcagacccaaggcataaagtttgtagtagaatgagaaaagatgaagcaactgttaatctttaaacttgactaaattatgaaattccttatgtttttacagtcaaaaagacaagccacctcatgaccttctatggatcacttagcagacataaattgcatgatagaacacccaagttctgatgctctcatgttctcacctggacactcttaaatgcttaattgggagcagttctagtgttttctttagagcccactgtgcagaaggatgctactaaatacagcataacaaggcaaagtagtatgtctgccttttctctgaaagagtgcatagcagctttaaatgtccacaattactgaaaagaagcagtggccattcaggacccaggacatgcagatcgccattgagttacctgattccctttcagaggacagtgtccattccataattttcaggcattttccccactgtctttgtctcttcgtggcttgatgacatacattttctctcagaaatctaaaaagtgggtgctggggagataggtcactcagtgaagtgctcgaggcaccacacttgaggacctaatgttgcatcctcaacacgcacataaagaatcaagcacaggaatgtttgactgtaatgctactcctgggaaagtggagacattaggatcctttggggcgtgttgtcagaccagcctaccctacccagccaaatctgtcatcatctctaggttccctgagaagtcctacccccaaaattaaggtagaaagtgactgaagacacctgacattgacctctaacctacacacacatgcatgcatgtacacatgcatgcatgcctacattcacagatgtacacataccaacaccataatgcaaaataacaaaaagatcccaagtgtaaatattctataataacccagaatgaaatacacttgtatattaattaaaatataaaaaaataaaagtgtggaccagtgacatgactaagtcctatagaagaaaagacccagtggaatatacacatgaatacatatgcatatatatatatatatatatatatatatatatgtaaagtacctatatgtgagcctgtgtacataatactgtgtaacttccaaaggagatttaccaaattatcttacataattggaggctggatcataccacactggctatttccaggctatgaaccaggatccccaatagctacttagtcccaagggctggaagcctcacaatagggtagaccagtaatattctagtctgaggccaaggccaggaatatccctggagagtcacaggagagttaaaaactccagaagctagactcggatattcgagctcaacatcaccagcaatagaaacacaagctcaggattaggcttactgctgctcacttgtgcaggctattcccctattagtgcatgcaagcccccagtttgttaacaggtacaactcaaattcaagctggttggtctttccccactcattgatgtgacagtcttggcaggtgagcccattgcaagtgtactcagaaggaaaccttactgatatcatcaagcagcctattaataatttttttgacttttttttatttgaattacaaacaagattgaattacatgacaatcccagttcccttctcccttccttcctcctctaccacccccccaactaaaaccctacctatcacatatcctttcttctaatctacacctgattcaatctttctgctccctcatgacctctgcattcttccttttcttcccttctcattctcatagctccctcccccttctccccctgctctcaatttgctcaggggatgtgaccctttccccttctccaggggacaaagtttgtctcttttatggtcctccttgtttactagtttctctggcagtgtagattgtagcagccaattaatattaactgagccatatcaatcaaacacagcatcttcagaaatattggaggaaacaatattgttaggtgttagaatgtcctaggtctttatctctgttttttttcataaaaatatcaaaggacacaataacctttatgtctgatctatcacgttatttaaattgcttcagactgactgaaaaatgtgttttctagatgaaaataggcaagaatattaatagttgttgaatactagctccatatgtatgtattctgcttcattatttctgtttttcttgatttcttaaaattttggaaagttaaatattaaagaaaaacaaagagatagtgttccattaaaaaaaaaaaagcagtttttattttcctgacagtaatcaactcaggcctcatagcatctaagatagcctatactggaatctttgtttaaatcagtgtcttggtaaccagcagaggcagacatccacagatatacactgatctgaactctggaacttagttgcagagagggaggaatgaagagcgaaggggtcggtaccaggctggtgaaacccacagaaacagctggcctgaacaagggggagcacatggaccccagatgctgtctgagaggccagtacaggactgatccagacccctgaacatggatgtcaataaggaggcctctgcactctagggggcccctggtggtggattagtatttttccctggtgtaagaagggactttgagagcccatcccacatgaaggaattcactcttgccctgaacacctggggaagggcctagacccagcccagaatgatgtggtagactttgtggagcccctatggagggccctcccctgcctggggagtggagggtggatggggttgggggtaggtcgggtgggataggagcagtgtgggtgaggggagggagagggagaagggattgacatgtgaagcaagcttcttcctaatttgaactaataagaaaagcaataaaataataaaattctgaaacttaaaaaaaaaaaaaaacttaaaattctcactggaaagcaaaactccccttaaaaagtaaactcatcttgtggagatataattttaaagtaaaggcctgaagagaaggctaggtggttaagagcacaggctgctcttctgaggggcccaagtgtgagacccagcacccacatggtggctcaataatcaatcatctttaactctagttcgaggggatctgacaccctcatctggccttctctggtaccaggcacacatgcgatgcacaaggtatacattcaggcaaaacacccacatacaaaaaataaataataaaatttaaatttaaaattatacaagtctcagtgacgatatttagtgtaagcaaggttttgtcttactaaatgattagaagttatattgttgttgtaagttgccaaaatacaagctaaaaaggaaaagttggcattcgacagataatttatttcccaggacattagtgactatttttgaaaaatggggttaatgctggatttctgtctgataggcatgaacttaaatgaagattaatgactaaatgttgctaaaacatattgagagttatttgaagtgttaaacacattctcatccattgtttgacttgtaaataacttggcaacaaagaaatacagtaagtttacatcagtctactattatagggtatatgggaaatgagacaaagctggcttggcaacttcacaacttttaaaaacttctaaggttagaagatttctacatctatgagcccaagtttttcaatggagagaaattaggacagtagattacttcattatctctgtcaaatactcatttaacaaaggcaggagggaaagcaagatttggaaccttggaagaagaatagaaaaaaaatttaaaagtttttgaacaaaattttgttcctttatacacaaagaaacctcctgtctccccaagatagagtcgcctctacaaagtgtattggtacctttttgccagaaaaaaaatgctcactgaagtgttggttaaaatgtatgcttggggctgagaagatgatcgcctactactcgtacactgttcccagaatccacatggtggccaacaattgtttgtaactctagttccaggggtctcagtgccctctcctggcctcttgcatgcacatcattcacaaaacccatgcagacatacacatacacattatcattgaataaataaatatttttacagttttttaatgtattctttattcccccaaattgtctgagtgaactgtttaggtatcatctactggagatagtaacaagcttgctccttcctgctttgaaggtgtgcgaatgctggatggcgatgtcacagacatggtggaagcgaagtctgtcagctacaatccacagcatgtgcacatctacagtgccagctggggcccagacgatgacggcaagactgtggatgggccagctcccctcacccggcaagcctttgagaacggtgtgagaatggtaggtttcaaaagcatctggggtgaggattttcatgcacagtttgtaggcatgccaccatccaggctagaggattgccactggaaagatgtcttaaacattgcctcatgagttgatgaactcagagttagtctttgctatggcatgcacagcgtacttggatatctagagctgcacagaagaaatacattaattaatatgtgaatgtgacactgtgaaaaacaaattcctggggctgagaaatcgagtgggtattcactgtctccatttggtgttggtaggacacacagcaaggtccttctagcatatcaccttggtgtcacttagtctcacttctgtccaaagacaatattattttttctatgggcaacagatctccctaattaggtaacttagcattttctttgatgtcactgaaagagtggctgaatgatgtccctgggaaacctagctccatgatctattgggaaaaacaatgtttcaaaatccagagcttaaattgccttgaattaaataaaagtaaagatgctagaacttatcctcatggaaagaggagtgctgcaccagagcggggttttccattcttgctaatgagtagaactttcggttacatagcataaatttgttctctgcatgatataattgatctggcctgaacttgccttgcctttctcatcttctcacccattgtcttgcaaacattctccactcttgttcatagtccatcagcacattctgtttcccctgcgctaccccccaagtccttcaatcctcttctaaaaagccacagcttcccagaaggttctctcactccacaccaaaattcactatcattagtcccctgctctgtgctcactgtgtttgatagtcttactgatgctagataaagaccaaataatatttatatttcataagaatttgttatgggcgtatcttcctcacaaaagttaagtcccaagagtgcattttatacatatttatggctttacaaagctaagaggatatgttgaattccaatgaacactttgtacatgtttgctgcatcaaattttagtttagttcaaatgatgctaaccacaatgttttcatggactccgcccagatatggaacagtgggatgcagtcagttgattagcacaatgtttaagcaggaataaaaatgatagtgagtcttgcataattttgggagcctgggttagatttttagcaaaagcctgaattaagccatcccatgtctattctgaaatggatttgatggggagaagcacacacttgttttttaagtaattttctagcaaaaaaagcaaaaaatgtcagggttgtgaagacattttctttcctagttctgtccatatgcaattacttttgtgtacgtttaacagatagataatattgtaaattgttgcctagaattttgttttcaatgtatcttaatagcaaatgaatgtaccctatgtcatctgctgacttgttgccaaatctgtggactacaaattactattattgccagtaaactggctatttgagtttagttcaaatcttccaattatgagtgcattgcattcataagaaagagcaacttgaatttctcaataatatgaaaatccttttattagcaatgcacatagcctgtccatataaagaatgcccaagcctaataggtagatttactaactgagtaatggacatgtgggtaagtaatgcagtgccaagaaaaaagattgtaaatttctttatattgcagagtgtagctcaacagaaataaactatactcttaatgcataaaacagataaaaatgtggcactttgattataaaagtgcttcctttttaaagttatgtttagaaacatgtcttgtaagaaaccaaacacaaaggactatttagaaatagatgatatagaaagataaagcttgttttaaatgcaaaaactaacacttattttggtaagtcatatgcaaaaaaaatatgtgagagagaagttaataatagatttccccacccaagtagtcagttgctggtaagtacagatagaacatctttccatacctgctgactgggagttacattgaattcctgcgtggaacacatgggcatcattccagggtagaccatagaaatgtggatcattgggtttatttgtttcaaaattttggggaacttggagtaccataatttagtacctggcatatagctcagaatttaagcatgtgcttagcatgcataaagccttgggttcaatatccatcacccaaaatctggggagaataaggatagcatgatttattcagcattcctttgaggatcttctgaggattcatctgaacaaaaagggacttcaattttaagatgaaccattaacttttagagttgaagtagtagcaaaagcagtaacttttaaagggggagatttatcttctggttcgttgcccatctaaatctgaaatggcagcaataaaccattgaaataagacaaaattgaacggatagtgttttcatgtattcagtatagtgaagccctcaagttatactctttaaaggagtaaatgtttttcatttacttctgactttaattaaatcagatgacttacttccatttcctcttctaaagtggtgtgataatatactactcattcacagaggttttatgaccactcagtgagataataatccataataaagtcattaatgcactgtctgaatatagtaagtactccataagaagtatttagagagaaggtgttttcttcgaaagtactgtttaaatttgcccatagtccctcatccttctctcctagatgatgcccacattgcagaattttcaatgattccttcaggttactagttggggcagaagagaagtaacatggcccaggtcagcccagattgtctgagcttcaagaaggtcatttttgttgttcttcctcttcagttccactttctctaaaaaaagtgaatgcaatttagagcatctgcaattttactttgatcctctgggggagagagagagagagagagagagagagagagagagagacagagacagagagagaggatgttttatttgctcgtgtatctagtctcaaattgtttattttctcaaaagatgtttctctagatagctgtgagtataccattcaatatttcaagttgatattgggtagtccttatcagaaaaataaaaattttgaccactttcttatgttgaagcatcaagtgaaacctaaatttaacttctttaggcctgccagaaaaaacaaatgagctattgagtgatttgtggacctaaggaacaaaggcaggtaaagaaatgtcttcagctaactaactaaaagcttgtacagtgaccttgagtcactttggcccattggcgtcctagccacatgttctacttcatgcagggattaaaatgatttgtcctcgacccttgaagtttagtgagttactgctccttaagtaccatagatgagtggtgaagaaaaccatggtttatgtgtaatacctaatagtccatacaccatatcaacaagacaaaatacaagcagagaaactacaagaatatttcagctgatctgcatgtagtaaatgaaagacagctggtagctgagaaaagcagagagctactttagatgggaggggcagacagttctctttgaggaggcagaatctacagacgtaaaatataagccaatgatgtgaagacctggaagaggaatgttctgtgcagatccagcagaaagcaccaaaaaccgtgaatagcaagggtttgcagtttatttccaggacaaagcagtactattcctcaggcagtaggaatagtatgagcagaaagcagtagaaggatggggttggctaaggccatctcagggggtttttctaagtcacagggagggcttgcattccatcctgttacagaaagtcattggaggttcaaatagggcaaaggtcttgtaggcataccatctgtcgggtgaatgatgggggacaagagcaggaggttgcagtggtccaggacagcattgagaatgagacggcactgtccagaccacagaccactgtccagatcagacagcaggagagagaaggacaagtatcaagaaatctattcacaggggaaataaatgcattttgctcagtgctttcaagtattgatcgtgtccattctttctgctaactaatcagaaacaagaaacataccaagtattgaatttcaacatgctccccatttgtttattataagattattataacatttgactcagtaggatgtaacagtgctttcaaagactttaacaaaaccagaattgattcagtttatagccctttagaattaatgtgccaaaattgtatctgagaacctgttttaacacaccatatcctagttgacaactctctctcccccctcctctctgtcatctgtcaatcaggattgtattttatttgatgtcaagaagctataaaattaagtgtaatttttagagtcatatagtttgggctatactcaatgagcggaaatgtgatgatgatgatgatgatgaagttgatgaggaggggagatcgcaatgacaacaatagcatgaacatttaatattttggctgatctattcactgccgtcattcatctaagcccaaaataggctcttagtttttaatctagacaataatcttatgagacgggtgctcttcccccaatcttacaagtagagaaaacaactctatcatagctaccacagtcagaacaggagcctcaaggcactctcgtaagttcagctgtgcgttcccttctgtcttctttgacacatgcgactcttcttaatcgtgctttcctgttttaactctgttatcaaatacacaatcacacagttagaaagaataagtagggttagagagatgactcggcagtgaagaggactggttgctcttctagaagagtcggcttcaatttccagcacccacatggcagctcacaaccatccgtatctctagttccagggggttcagtgtcttcttttggccccatggataccaggccatacaagtggtccgcagaggtgctacatgccatccaaaactgaacatacacaaagataaaattaaaaataaaataaaaaagaataggtgatgaatctctgtcttcttccttggtatccccttccttttcctgcctacatttctcttttcccttaggactgaaattcttcgtggcctctcccaatcttgccttctgctaggccctgctcatgtcatctcctgcagccattgcatcagaactccataccagcaacacagtgaggctgctttgtctctttgatctccacacatagagacctccaagctctcatgtaacttgaaacagggcaccctgcctgctcttcctatgcagcccaacccttctcacccctttaaacctccatagtgttgtacttggttatcttgtgatcatctcctccgtaaagatccagagtctacatcctctactgtatgtcaaatactcagaacaggtcctgacacccagggcacttagtgaagaaagaaagaatgatgaatgaatcccatgtcaatttgctgtgtactcaaaaaccacacttgcattcctctgaccatatataatgagcctgaactgctaagaatgcatgataagccatggtggttaaagtacccagagtctgaatgcaggctctccaatttggaaatgtaagttctaataccttttttttttttttttttaccactttcagggtaagttaacctgtatgatcagtttgttcataaagtcaatggaactagcagttcccttagaagttcctattttaatgcctggaaaacatagtgcagacacaatgccaagtctcagaatgttacaagtcttaatcagattcacacctgaaatgagtaaggcaataaagaagtctacatgatcccaggagcctggtttaatctatttgagattgctgaatgatcccatgggagtcttcagataactattaatgtgtggtggttataagtagaagaaaatgctgagagaatatttccttcataaaactgaaaacataatgagatgggaatcaacaaggttttattttgttttgttttctgccaagtacatgagaattgctctttattttatggtttcttgggtgacttgaaagtacattgaagggtctgagttgtctcagagcaatgtccttaactttatctaatcaaggttttcaatttaaccatatagaagcttttcttttctctctgccatttctttctccctccctttattccctcccttcttcctctggagtcttactatgtaccccaagttagactgtttacccaagccgacttcaagctaagtcttcctccttcagcttcacatgcgctggccttattggcatgtaccaccacactcaacaaaagtttcaccacattttaaaaattgctttgaaatttaatttcattacagattctgttgaactaatctcttaaaattcagttaaatttgttagatctttgcagtcataaccgtaggactagaaattagttcgtcatttcaattcctgccactggtttctttatgtatctttgatttccttgtttttcttactgaaacttatggcttcagtctgttcatctattaagcaatttcctggtgttatttgctgagagtctgtgaatcctctccggtcctcacaattagaacatcttttacacagatctcaacaggatccttcagaaacctctcagccaatgctttggctttcatttctgcatgaacactacaattgaggaagtgtttctatatgcatgtattatcttcttttccctttaaaattcccatcattaacaaagaacactctaggcttttagcagggcacacaggatctctcatttttgccagggctttcagaaaaaaactttacatgtcgtgtaagtacctctctcgagctaaccgactgagccattggcgcactcattttacatagagacatattcactcagcctagacacacggggcaggcctaggccctgctccaaaggatatgacagactctgaagaccccccccatggaaggcctcactctccctggggagcagaaatggtatgggataggtagggtgttagtggggggcaggggaggaggggagggagagggaactggcattgacatggaaaacaatcttgtttctaatttaaataaaaattggagaaaaaaactttacatgtcaccttttaaaagaacagtataataaaaatcaccctgtcaccatttgcccttaggtggctttgacccagatccttggcaaatagtgtctaaggagacatttgtgacttaatctttttagctgatcctaaataggaaaatgatttcataaagtaaatgacaccacaggcagttttcaggtatcaatgacactgaattgggtgacagactaagaggctgacagcacagagttttctctgatggatgccgtttatctgtgtattccaccatgctcagcactttgctaggtggcgtggaaggatgaatagctcttagctcttgtcttagggaaaatctctatgtaatgttgaagaactgtctaaataaagtgctagcagactcccaaaatgtgctcgtcttacagaacctagtcggcggactgaaaacacaacacacagtaacaaaacctacttgtcttgaagccatcttgttcactttgggttattaaagtttaataatatgacttgtgcgattggtacccttggtacttatcagcaggtggctgacacgttgacagcatttcctgacaagtgtgctcaattatgtaggaaattgaaatggaatcttttctgtattcaggaaagcttatattatggttgccttgtcattttattcaaaaaagcttatttaaatacccactacatgcttagcattggtttggcatttgtccctgctccccacccttggagaacccatgtaactcactgtgcatagttaaggaccacatcttacagaattgtcttgggctgaggaaatggctcagcattaaaagcacttccacgggaccagagttcaaatcccaacattcctgtcaggaagctgtggctcacaactaactgtaactctaactctggcttctgtgagtactctctctctctctctctctctctctcttctctctctcactctctctctctctctctctctctctctcacacacacacacacacacacacacacacacacacacaacacaagataaaaataagtaataaataacatttttaagtcatgagttttatctgccactttatctgcaagtaaattttcaagtccagggcaactttctttgagggttttgtttggaaaggtcattagcacattcattgaattctgaacagagccaatatccaggacaaggaatgagagtctaggaagtcaaaatctttgcttgataacctcatgttggaactgtggcgctagctgcatcttcacactactgtatccaggggtccagttcttagttactgtttcttcttagaaaattaacattttctagttgagtagatatgcagagtgttggatgaaagcacaaggtccttctacaaacacatgttgtctgttgtaaatggcaaagtcacacatgcgtgtttttaaagcccttacattaaaggcatgtgttcaccaagaggagagagaagaggcatgattcacatctataataaaagcaacatgagtaatcataattaatttataaaattaactgattccaccagagagggataaattttttttctcaaatagacacccagctgtagtaggattattccagtttgcattttaataaatgacagctggcttctgcgttagctgttgaatgttgtaaagctgtgaaataatcaatggctaggctaacacagatgaaggagattatttaaatttgctttgacttaatgagagtttatcataactgagcctgtttttactgtcttgcctcaggatttagctatacctgtgggggaactctgtgaatatttataaaaactaagaaattacttgtcaggcacattcaatttaatgtcatccatttgttaaacaaaagtttgtctttcataaatacatgtgtggtttttaagtcctatgattatcacagtattgcctgaggcataagtatcaaattttgattaatacattaatgaattttatctatcatttttaagaaaaggaacacaaatgggcaatagccttatctatgtaaaatttttaaatattcattgctaccccatttatagctttaaagaggtgttagcatttatgtagttaaattaattggcaaactcttctaaattcctcttattggttatttttttcatttctatgacaagtacttgaaaacagcaatctaaaggaaagggtttattttggcacatggtttgagggtagggaagtcttggctcaagagactgacacagctggtggctttgtattcacatttcagaaatagaaagagactagttggtgctggttttttgctttgtattcatcctaagagccagttcattgatgattccaccaatattcagagtggatcttctcttctctggtaaatctttctgaatatgccattatatacatatacaaaagtgtgctcccatggtggctctaaatacctttgggttgacaatggagattcaccatcatgtgctgttaggatgctctacccctgtgttagctacgtatcagcaggaaccctcttcttatggcttgcttggtaactgcttggccaactgggaagcaggaaaatgtctcaaaagttgttctactgtgcttctagaacagcaaaagcatacagatattggatcaggtaaacttaaggactattctaagcagccatttcttttttcaaatgtaaatttgtgaaagctggtggagagaatacataggtgcatttccttcaacacgacatgacagccagtcagcagaaaatataggtcactgtgtaataaacaaacataaattgaagaaggctgatattttcctatcgcttaaacatatgtatggctcgtggagtagaatttgtagtgcacatagtatgtctacattcctcgttatacaatgaatataatctagtgtaatactcaagttttttttttttctttttctaaacactgttagaattgtggctctggtagcttcataggagtgcacagtacacagatgtatgagtcttggcgaagtgaggcaatgtagttggccactaagaagcataattgtggcttatattcagatctctgtgttttttcccattgtgttgtattgacttctgttgagtattatatggcacatctatgcatgttcagtcaagatgtggtcacagaagtgaccccagcaacaaagaactgtgtctttggctgtctggaggagttgttatccaggccatactgaacaacatcccagacttcactgtgctggttctctttcttgtcaacttctcaggaggttcaggactttacgaagagtacaggccattgtcagtttgagacaagatgtgttgctaagttgccagcactcctatttccctgtttcccttggaagggaccatactcctgtactcttccttgaagcccttacaaagacccagtgacatggctcatctgatggctgaagtactcagcctcaaagctgatcttctcttcaaaggaaaagtggcattggattcacttttaagaatcacagaatattcaccatgaagtcttctataaaaaatgagtctaatataatagttcctttttattgaagacagaattgtgtttatggattgaaaatgctgtgagttggttttccctatttcagacatcttataaggtaccaatataaggtcaaggctattgcttcatatagttgaagactgtgacatcattcaagtcccacagtgggttatagagaggggtgacttgcttattgcctttttagagttgagccagcagtcgcagtaattcacagcaagaattccacaatctagagctaacatcaagtggtatcaacttttattatcactggaatatctctgttctttctaagtgtcttttcaaacatttacagtaaattcttttcatacccctgttggtaataaatgtttttattctccatgaaggaaatttttcaaattttaggccctaaacataaatttaaatataatgacacatttcaaaacagtttcaaatttttactttttaaagatttgtttttgtttttaagtgtttgtgtttttatttgtgtgtgtatgtatgtatgtttgtgtctgtgtatgcagatttgtacatgtatgtgtaagtgcccaaggaggccagaggcatgatccctcagattcctctggagctggagttagaggaaattgtgagccacctgacttagctgctagaattgaactcagttcctttgcaagagcagtacctactcttaacccctgagccagctctccagcccctccaaatcaaaactagaaaattatgttgtgaggtcctctcttgcttccatggacctgactctgctgaaaggtagagcatggctttgtctttgctgaaatgaccaaggagtagagagttggcaggtgtcacagtggactttgggaatgctggagtaagtcactgcccagaacagcttagctggtactagctgttggctacgatttcttccgtgagtttatgatacacacaattttgtcttggctgcttgaaataaggaagtgagaatgaactcaacctatgtgacttcccttccaaccactgttagcagtccttgcaccatggaatagaagcttgcacagggctcaaagtatggctgtctgaggggtgactggaaataaataatacctgggtctttttgaagtttcagtttgttttcaattgatacataaacaagctatgtatgtactaatggaataccatgctttgtaacaggtgaaatatgattttccaaatttaccttctataagcaaaaaaaaaatccccttttcagctttttgagatgacatgtttctaggtgaggaggatgaagtctgagacagcaggaagaatagccagcaggctgatacttcagtgttcttgacttagcaaataaaataaaacaggagaaaggattgttgttgttttttttttaattagcttaatccacagttgttaagcagtatttaagccacactgtgaagtattttcggggacatccagtgtcaatggagatcacacttggtgaaccatgatccagtgtgccttctcccagactatttctcatatgtcttcatctctaggtactattcatagcaagatactaagctccaaatttctattacttgaagcacttggatggatagactatctgaaaataaataaaatactttcagtaaagcatatttatttctggttttgacacccaagttttgtttcttcatagatactctactgccatttctccttgaaagactgattcttctctccaagttacatcataaaaatatgcaaagtaaaagaaatccaaagcacagtagtttcagaagccaagaatcacacccctgttcaaatctgtgatgtgtcagatgaggcacacatctgaaagctccagtgttagtgaccccttcttaaaaaaacccatctctgaaaatagggttgattaagcttttattatccttatgcttttgttgttttgtttgaggttgttgttattgctgttgttgagacaagttcatggcaagtttcccaggctgacctcagtatcccaagtatcccaagctagtttttatgtcatggtgattcttctgcctcagcctcctgagtgctggaattgcaggtttatgccaccatgattggctaattctactaaaatttaatgcatttatattatttaggaaacgataggcaagcacttccttttaagcagtttctattcatacaatgaacacaaaaggagcatttccaggaactggagattggggagctccatatttccaggctgttaactgccctttacactgacctttgaccagatagctcactgtctgcaagtgtcacctttaaaagttgagctcaagtctactctagctccctgaatcccatgctgccagtccatggactagaattccaacaaccttgtgaaaaagcactaagtgtcagttacacagagcatttaaatatctgctactcaacttaaaatatatttaaacataaaacaataaaagtaaaaattcatttttattaagaatgcttgtcacaatgaccagcagctgactccatagtctttattgggctctctatgcctttaaaaaactgtgccgaccgcattgggtatgctcagcgagcatataaaattcatttttatttgtgtatggttgtataaaattaatgtggttgctaataactgcatctaatttttcagtgttttattaaaaagtcaaagaacataaaaaatgactttaaatacttggttggcttagtagtctgctgtatgcacagaaagctagcatacaaagaagcctgttcagagctgagaaaaatgttggctgagatgggcaggattaagggggagtgacatgcaggaatacagaattgaggacctgtaatgccagatcacagataccttccttcttgcacatccagtgcatttctttccacaggggaaatggaaaataattgtatttgcattccagttgtttctattcagcatcctttaatggtgtgggatgggaatgaataagaccacgccatagatggattttgccgagtcagattcaactgggactgtgcagggagccccctcagcagctgcatgaaacaggtacttaaaatgggggacttgtagcctggcaggagttaggctaaggagatggtgcgaggcaggaggtgtggctgagggaaacctgtctcttgattgagaagttgttgaaggtcaacttaaaggggctgttcttagtcattaattaggatttttaatcttgagactttgactcagaaccttgactaccattaaatcaccaaataagtcaactccactggatgacagtttgtcttaaaatacattaagtagctcttccatttaccttagctattctgagattagaagcagtgtcaactgagactcgtgtgatctttaaatgggatgtgccaatagtggcaggtaatataaaaaggagtctttacatgaccgttttctgggaggcaatgctgtggcatgaaagccaagtacctttgcatagcaatgttctcagaaagcagcaagcaacccacagacttctaacccacagggtcaaatgtctttttttataaacatctcatgggtccctggatttgggggccggggaatgattttatttctcatttatttcagtttcatataattaaagttgctagtctctgctcagtgaactgaaggaagaataaatctcaggctttaataatgtctcacttgaaataagccttcctgcttccagatgacgactttacccccagaaaccctcccccactgcatcccccaagttagaccagttagtcaccaaggtactgagcagggcagccctctctactcctgcagagcgcttgtcacctacatttcctttctggtagcttttctggttattcattattgtatgataatgatccccaaagttattaaaactgcttaaataagcaacatattttgaaattctgaatagttattagacatttttattttggcttttgatgcattgttttgtttgttaatttacctttaacctgtatttctggaccaaagctatttcactcaagcagccctgccctgagtggaaagcattttggaactgttagtctgaatgtcctttaagcttgaaaaagaaatagctgttgcttcacgcctcagctaccaaatcatttgttgtaggtgcccgtgtccctccccagtctctgcctcctaactctggaactctgtatcataggacacaaagactcaagctcccatagccatgggataaacaaaagcttacagagagtactgtgttcttggctcactgaggagagggagctgcacagaaagtaaagaggggcctagacaaggcttcggtaaagtagatactcagttgcttacagacaaatgaaagaaagttcctaattctcatgtagtttcagggcacactgcatgttctgatcaaccttgatagggtctcctgtttctaacatgtcctgattaaatgatgcaggacacatcatttcatgttcttggcttcctaacagaatctacacatagcattctccaccttgctgctgctcactattttgttctcaattaacaaatacaggagccattcctgctcttgtcttcctcctctgtctttaattgtaagaagcctctaatatttattcactgttcttcaagaaaacagctaagcaatattggagaaggaatgttttactaaaatgccaaataaagcctaatatcattggggggaaaaaaaacctcattttaaagaaaacttcagtttcatcacactagaaacttctcaacccccaccctccaggagtaagatttaattaacaacccactataaagtggccacaaaagccagatccttcttatcctccagtaacagtgcttatggagttatataaattgactttttagagaatatataaaaaacacacatgttcattgagacacacaatgaaacagactgttgagcatttagctgaatgagacctgcgtggatttcacaatgtattttgccttaagtttcctggctctttaacttggcatgcagttcaactgcaggcttgttttgtttcccatatttaaataacctaatgcaatcataatacttaaccaagctaaaacagtgacattactacttacccttcaggaaaactatgttgcaaagctctttttgaatcctttgtccacttcaccttctccctgtacccttcttaaattactctgaagttttagaaaaaggggcagacttacgctgtttttcaacacatatgttttggtttggggatatttcacactaatgcaaaccccctgtgcctctgcagtaaacatgtctgtgaattgctaattgttttagattaaccccagaaatgtttggcagacatggttatggcattttcaagccacaaatttagtgtttatttttgggactttgatcataaaccctccacataggcgtacaggtcagttggagagaatgggagaagcatcctgcgtcctctagctctcatgacgatggaccactctgccttctcctctgtgcctgtattcttcagctctggctgccttaaaaaaacagcactggctgggtggctcaagcaatagaacttaattttctgcagctaatcgtaaatgctggaaggctagagccccaggcccatgaaaccagatgagtactggtcttggcttgtcgacagccagtgtgtcacatgacctttcctctgtggccacattctgcgagcgcttgctgctatctccttccctctttatgataacaccagttctgtctgtttaggcttacactaatgacctcatgtacctgtaatgacattggggaggtacaatttagcctctatggcatacaaaggactcccccaaccagacacacccccaattcagctctgaaacactgatctctgtggcttctgtctatgggctacaatgtcctgcatagactggcaggaaatgggttgaggataggagggggttctgcaggggtaaccttagtttaggagaccttcacaaatcctagtgtccctccattactaggtcccaatgactcctctctccccattcccagaccttggatgcctagtgaacatgtgctttccttttagatttctgtacttatcatcttttgtttatttgtaacacagagtctttctatgtagcccaggctggctttgaactcacagagatctgcttacctctgcctccctagggttgggactaaaaatgtgtcctacccaacctggccatttatttatctatgcttgttaatcataatacaaaaattatcccttaagagttaatacaaaggcccggggatgtatctcagtgacagaaaacatgcctcccatgcataaaatcttggattgcatccccagcattggaaaaagctacttctttcaaccagacacattcatacccgcaatcatagtacttgagagatgaggcaaaaagttcatgattttgtggccaatatccctctcaaaataagcaaacaaaatcaaaaggaaggaaggaaggaaggaaagaaggaaggaaggaagaaaagaatagaggaactagagagatggctcagaagttaagagcacttcctagtcctccagtggacctgagtgcagatcccaaaatcttttttttttttttttttttgcagatttttttatttgaattagaaacaagattgttttacatgacaatcccagttccctctccctccagttctcccctactatcctcccaactaaaaccctccctatcacatatcctttctgctccccctggatggtgaggccttccatagggtgtcatcagagtctatcatatcctttgggatagggcctaggtccacccccatgtgtcttggctcagggagtattcctctatgtggaatgggctcccaaagtccacaactatgctagggataagtactgaaatactacaggaggtcccgtagatatcctcactgaaacctgtgttcctggggtctggatcagtcccatgctggtatcccagctatcagcctggggagcaagagttccccgatgttcaggtcagctgtttctgtgggcttcaccagcctggtctggacccctttgctcttcacttgtccttctctgcaactggattccagttcagttcagtgccaaaatctttatggggcagctcacaacttccagcttcagctttaagagatctgacaccctcctttgccttctgtggatacccctacacatgtgatatacactcacatagacacaccacacacacaaataaaaataaaagcaatttgagttgcattctccctcttaacaaaggaattgttttacttgtatgttgataaaactaatacatggtcatgaaaacgtggtttaaagaagaaaataaactcctaccaaaccaaatggcttctgttacaccattcttgtgtgatagccttatgcagataacttctggacatacacatttctattttcttagctaagacatcctgtactatgtatacacatagttgtatttattacaacttataagcacaaaagtgctttctgaacatttttgtattaaatatttaaattattttaaactattttaataaaattgtatcctgaggtacacagtcataaatttagataaacaaatgttattgcattgctttgctttatcgtggctctgtgattctctttctatcatctgttgcggtattggttgcatcaggtaggtcttctgccttcccatgcattcttttggcctgcccaggtaagttgcagtatgaccatgcttttggcctgtagaaattccttggtctctgaaagagggagtgtgctgatgataacaggaacattccacattcttctggctattttcttactctgaggtctagtgtaaatctaactgttcacactaaggtgagacagacttccttcgagtgctggaaaaggcattgactgagtcttagttatgatggtgtgatcatgtctacattcttctagatttttactatttctacagtctaggttttctaaatgttatgatgggaagtcaggggtagtcgagcagacccagctgtccattagtgatagcaatagggtctctctctggcagttactgtaattcttgttttcgggggggggggttatctttctttgtagacaacattgtaattttacagttgaaaaaaataaaaagaaatatatattcatcttggtctcatcaggctataaatattttgttccccaaggattcaagatcaagaagagtttattgtgaacagtctggatcctttgttatcactatatttggctttttaaatgagctactttcacaaaacagtgaccaaagcactgacagaaacaacctaatgccagaaaagcttatttgactctcaatttcagaaagttttagcccattctgtgaggcaagtgtggtagtggcttagtccaccatggagcaggggtgagggcggttctcatcccattagcccaagtccctgtggtaacctgcagggtccaccctgaggctctattttaatcagccagaccctgtctcctgcaagggccaaggcctcccaaaatagagctatcagttgggaaacaagtgctcaaaacatgaacctgttggggcgttttagattcagactataactgtataacatgtttctccttccaccttatggccttgaagaaaggctcggccctcaccagcatgtggctttattctcagatgcagagttgaagatgatgggtttgctatagatagccttcagtgtgccttccggctttaaattgattctttttcattcttaggaatttagctagcaaagaggcaaagatatgttttactcattcatcattgctctcctttggtgctactcattacattatgtaggacttcaaggtactcttgcagctattttaagttaccagttttgatggaaaaagtgcctcagttcttagcattttgaggaatggtgagttgatctattctaagaagtacgacccagcactactgctcatacagacaatggaatttggcatagacttctttatacttggtgattctcaggtatcaaacaacattacataacaaccttcctttgcagtagttgtgaagatttaaaacaatattgactgtatcactataattctttcaggaacatttcaaatctaaggtctgtattcaaatttgtctttccctgatacatctcttatcactgtggatcatcactaaagcttgatacttcagttcctcatttgcaccatagagagagaaaaaaaaacaaaacatattggtctcacatgtttgttgaaaagttcagcctgagtctataaagcagttataattatgctctttttgtaaatattgatcattcttagtataacattgcctttattaaggcaactttcctccccaaggcacgagttaaacccaacatttcattaaaacagtaccactttcagcctgcaaatactttattttaatggttctgatcttctcttaatcgacaacctggggttctgtcttctcatgtctttaactttctccgtctatcaacaggggcgaagaggtcttggctctgtgtttgtctgggcatctggcaatggtggaaggagcaaagaccactgttcttgtgatggctataccaacagcatctacaccatctccatcagcagtacagctgaaagtggaaagaaaccatggtacttggaagagtgttcatctacactggccacaacctacagcagtggagaatcctatgataagaaaatagtacgtaacttttgagtgtctattactatcaatttctttggtgttcccattgaaagataaagagagatccataaatgtgtagaagtagcatatgaaaaccacagttcagattagctgatgataccaaataagtcactgtaaacattaacagtctattactgattcctagaaaatgcttgtctggatcatgatatttgagtattagcatagctttgatcataattaagcttcagtttaattaagaacaaatgattggtctacatttacatttatagtggcagaataaaaacaagaatcaacatgtgattctcagcttagtgcccctttcgctgacttttgattctggtgtgtcatgtagctaattcattgtgaacaaaaagtctataagaaaactgatgatcatactatagatgtatgtttgcttatctgtatccatggactgtacatctacagaccaaccaaccacaccacattgaaattaccttgaaggtattttttagtagtctttattcagtaaacagtacagtattacaactatgtacaaagcacttgtgttattttgtgttctaaaaggatctagagattgggtagtgtctaaggaaggatgtgagacatagatatgcaagtattatggcattgtatttcatattcaggacttaaacattctcagattttagggttcctgaaaccagacctttgcagataccaagggactgtatttaaccaatgtgtactaaccctgtgccaactgtgcttttctgagtctactgtagtcttctaaatggggaattatgcaagtatggtggcctctcctgttcactaccctgcactgctatcttgttgaagagctaaaggattcagaattcaggttactagtttggcctacctgagtttgtgtcacttgagccatttactagatcaaaatccttccttatatgtgagggcttaatagtttgtagttcatggagccgttgctgaaataattgggggagacaccagtcaatgaaagatgcaggctagtgctagcccttctcagtgtctgtggaagctgactcttagaactcctaccacagctttgctcattctaaatgtcaaattccattcctcttctcctgaccatggttttgtgaagtgctcaggacttatctttcgaatgcccagctgagctgttgtacctgatgtttgagaagccacagaggaacaggtcacactgtggagtgacatctcatttttcaacagcagtaggggagccactgcacattcactgtgccaacccccaaatccaaaacactaaatccaacagctaggtaacactggtatgaccccacatttcaagactatttaaagcataaaaatcatttaaagtatgtacagttatagacaagctgtatataaacatgaagcataaaggaattctagttcccaatatagttcattctgttcaggcatcccaaaatctgaagaaaaattctatagtccaaacccctcaggttcagagtatttgcctccatgtgaaattaatttataactattaatcttctgttaatggcttgtttattataagatttttatgtttgatttcccaactgtttttttagtacatactttagctacattttaaagatttcccaaacttttcttaattcttccccaaatgtctggattaaaaaatatttacaagtctggggatggaaagatggttcaacaattaagaaaactggttgttcttccagaggaggtttggttcccagcatccatataaacagctcacaatcatgccatcccaatcccaaggtgccttcttctggcctctgtggacacttcacacgttgtacatagacatacatacattcaggcaaaatacccatacacataaaataaaaataaagttgtatgtatacaagtccatttctcagtacctcctccatcatctatcaatgaactgactctaaacacaaagtaaggagaaagtgcagcgatgagcaagacaagatgtttctgtcttgttgactttattatacaactgtaaacatctgtatatgcctttttgcttttcagtaggaaactgtgtaccccctagcttgtcacccctgactttcagtgccctgtgatgcccgtctgtatcacaaagtacctgagaaactcaagaatgagattcccaaaatttagctctagagtttgaggatctgcagcaagttcacacttgctcccaagcatcttgtgacctggccagtcctgttgttccctgtggcaccactgctgtggggatggtattgataagttccacaaatgtcttatctaaaagaagcttgtactcaaatggacaaaatatcaaaacaggaggaagtatgccccacatctctgatggaatgcatcacatgataagggcaacagtttctcattacaaatgcaaaaaaaaaaaaccgaattcatctctacattttctccttctctctacctagttcttcaattcttttctttttatctgcaccctcaaaacacccacaatttggtatttggaagaatttgaagaatttggaagctattctgacttcttactgacctggtactaagccacccactcagtcttgacctcctcagctgtaaaattgaggtgacactcacatggcctcagagattgccatgggagagtaagaaaccaaggacagtaactgcctgagtctgagtgcctggtgtgcatatggctctgttagtggcccgcatcattgtccttgggcctgtgcagccttcagcatcctgaaaggctagttggtcccatctcctttcacagagtttcttgttgcaccttcatttttccaatccataaaattctgtggtctgttccaccaaccccataaagaaagccactgtgattaggaacatgttaacagcctgaacttgagtggaattggcagcagcatcagaattttatggtccagctgaccccctttccctccagatgtcaggatgacgaataagcccacagtgtgcccaagaccttgccaccaccaggctttgaacctagactcctgtggtctctgggtgatgcctacatcctgttactggcatctttgattgagtgctaagggagtggcagtgtcttctttgtactgggccccttccctgagccattcatttccttctgtcatttgctgtctctccagaaaagcacagttgtcattcttcattcctaagagcacctttgtgatttgaacccagacagctgctgagaatctgagggacaggaaagattctcgtctgcttctgggaaagcactttgttaaataaactttacatatctgggacaaaaggtcttttcatgatctgcaagcagacaagcttgccctgggtttcaaagtatagtgaggactgcatacctacttgtcctgccattactagtaacttaacagtgggtgctgggattatattcacactctcatagacttgggaccttgttggactcacagcttatcccagcaaatgaaacattcagaatgtcaaaagcctaacaagaagctcttttctaaacaaaatgatcaggaatgactattgtttgtttgtaacaaaatctcatttagcacaagctgatcccatggtccttctgcctcagccttccaagtgctaagatttctgccacaaccgctaagccgttatgttttaagatttatttttattatttttaattatgtgtactctgagggctgtgtgtctatatattacttcaggtgccctaatataatagtgagccacctgacctgggtgctgggagccatactcaaggcctctgctagatcagtatactctcttcaccactgagccacctctccagcccaccctgactagctagtttaaagccatgacttgaagtaatgtttttgtcaacataattgaatacataatattctgtatctcctgtgacacatttacagttgccataacatgtcataaacatagcatttgtggtctttctaatgaggatgctgcatgttggctgcaacctttcatgatatcatgaaaaccctgtggacagggaccatcttgttcaattcacaaacgagaaagcagaaacttgaaaggctaagaaaagaaagcacatagctggtctgttgggggtgcctagattccagtcatgcagaatgaagcccaagcctggatgtcatcagtgtgccatcatgcccccacacttgtcagggccatccagtgtggagctatgttagagatgtgtggctgcttacctggtgttctcttaatagctgctttccaccaccttgctcttcctaattgaatttctggcctctaccctttgcatcatctccttaatcagacatacaaacctgaagctgcgttagcagcagactctcaagatggtccctctgtatgatcaaagcagggcagcatcctctgccgagggcttctaggagcacgttgcctggtgttacccttcagctaggcatcctcttctttcattctccgaaggcgtgtgcctctgtgctcgctgcatgtgggctcctgcgtcagctttgcttcccagtgtacttagcctcacttgacaccattgtctacattcttcatttactgtctgcttttcatgccagagtggaaactacttgagaacaagagtctgctcttggcgagagctggagctccataagtgtctgtgcaaaaataaccatgtaaaaataaccttcacggaaggtaaacatttatcgaggtatttactatggaaaatcataaaatttatgtgtgtaacaagccatacaagcagtcaaaagtttgcctttaagcctccctactttccatagctttccacaaatatctactgtataactaaaagtcaactcagtaattccaaccaggaaattatcattcctttagaacctgacccccagtcgtttgtcccgctgattaggttttgggctcctttgtgttcctgttgggagaggttccctgagccatactttggatactgagcatcctgctctcttcttctgatatgagtttgcttctatgtgttcaaacacacatgcagcctggagtatctcagggtaggccacaggaccaccccaggtagaggaattagccccactgctcttaatgcttccaagcactcacacatgctcactgccttggtgccctgctctcctgctctccagcctcctcctgtatacactcctgtttcaaactaggttgctgttcacatcgtatctttctctgccatgttctctgctcctttgggtttagaaaatctcattctttctttaaaaagaaaactcatactttctgtttcatgagtaaaataaatagaagcacaagtccagatgtgctcagtactttgacccacattctcctcagagcataacaaagcatacaggaaccctgcctgcttgctgtacccgcttactggcaggctaggccaccaaggctattctgctgtcagtgaagtcatggctggaagtcttactcttgctcttatcctaatgggtactctaaaactctgctatttcttacattgctggttcaggatttaatatcttccccacttattaactgctttgtagctgtgcatcctggaacatgataattagccttgctgaacctcctcttccttagctgttaatgatataatactttccttgcaaacatcctgtggctatgtggaatgttctacacccaggttatttcctcatttaccatcagttgctaatggtggtagttggaggagaagccttggggctggaattgtgaggttaatgactacactgtaatccttgggttggttttggttttatttattcgttggttggttggttttttgagtcaggctctcctggaactcactttgtagacaaggctggcctcaaagtcacagagagtgccggcttctcctcccaaattctgggattaaaggtgtgtagccccaccacctggataatccttggattgagattaatacacacataacacacattttctgggatgatcctaagtttcttggagtcctgattgaatagtcaaaagataagtgacctagaagtgtttctaaataaatggaaaagttcagagtgtaaaatgaagcaaggtctaagggatcttgatgcaagcagttcagttccatttagcaaagaaatacttctgttgcaatgtggagctcagctgtacattatggggtatacagatgactcaggataggttccctgtttagagaagcatcctcatcccttgcactccacatctctagggtctcttagtaatatggaagtggttggtgttttatactgaattattcctgctcactgaattctgtaccaatcttggtgacatctctgggcacagaaatctttcagtgattctctttcttttcatgtccttgtgcttaataatgagctacccctagctcattgtctctgtccttcgccacaattgctaatgtctaacgtagctcaacaaatgcaattccaacccaaattcaagtcagcactaggaacaaattcagcctaacagacagcaaaaatcatctcatgttttaaaaatatcttttcagttactcttttaacaggtatgaggcaatctggcaccttcaaaataaaaaggatcacagggtatcagggagacaggacacttgctgtaggttgccgtaaaagcttgtcacttagggcgcaaatcagtctgcactgggattccctggagaatggtatcaggcaacagtcaaaagcccaatcagctccaataatgaactgtgaagtattaggaaataaaagtccagtgagaaaagtgatggttcttctcaaggatcatggctggggctgaacaataccctgcctggctcaccaggaaaagatggcaaccctaacattgtggactccaaaaccccatctgctactgatcctatgaggctggaaatctaatttgcccatcaggatagctttgatgtgctcagggcccgtgtcttctccagtttccttctcagtgatggatgcaaatgatattttcttgagcaacttcagttctttggatacaaattctgtttctgatttgggtggtgaattgagggaatttggagcaggcgagactgccactgggattgagaccaaattctgagacattctcgagggagtctgatgcaggagcgcatccgccctatgttgtgggctgcacactggatgccaatttccttcgaggtgcattggtggatcctatgttctgtttcctgcgccttatgatgagtgggattacccccaggttgttctggttttaaaccatcatttttctcttagattgcacattctatcgtgatctttgttttttctttctgaagatagacataaatatttctcagtattttggcttcttttaatggtgagaccttaccttagatgctcctggtaacttacacctgaacatctcttccactgacagtaacttcctattgaaatgaaccagccggaattccacttagagcagagaagggagagggtgtttttgtttcttcttttccctgaatcctttaacctccaagttcccatcaccttcctgttcctctgccctccaactcctttcatgcagttcaggtgactgaaaaagttagagaacaacaatgacttaaattgcacacatacttgtcagaatcgatagaatttgacacaccattagtatctctctgttacagttcttagtagcttttctataagtatatatgtgtatgtgtctggtgactgtaaaaggatgaggcatatttgtgctatggaacctacatcataaattatttcctgttcatgtttgggcagagctggcaatttgtgaggttcaacaatgctgaacatactctcagtgtgtttagtgtgaacctaagtctgtgcattgaaagtgtctgctacagctgaagaataagtagggaaatataatgaaaaggctgaatccagccacaattcattgaaaaaaaatgacacacaaaggaatatgaccatgggatgaaggaaaatactaaaaattttgtctctcaagatcatctctcaaaagcaagattctggagacctagaaacaagccatttctgtgcattcacgcttggactcacctgtacctccgaaaatgactaggaatccccctatgatagaaagtggggccgggagttggtggcacaagcctttaatcccagcactcaggaggcaaaggcaggtggatctctgtgagttcgaggccagcctagtctccagagtgagtgccaggataggctccaaaactacacaaaaaaacccctgtctcgaaaaaccaaaaaaaaaaaaagtggggtagaaatgcctttttataaatttacttattattgtgggcatatgctgtgtgagggtgggagcagttagttctcttcgactaccattacataatgttaagagatcaaacttagtttgctaggtttacatagtaagtgttttacccactgagctatctctttacccccaaatatgcttcttttaatgatacagcaaccccacttctggtattatattcaagggcacttaaaatcagatttccaaaagttttctgcattttgtatacatttggaacactgtttagaggcaaaggtggaagcaagcccaatgtccatcaacagatgagggattaggaaagtatagcacaatggagtattggatatatatataatcttatttgacatagcaatcccagttccctcttccctcccatgccccccactgatccccatcccatcccccatccactccccaggaagggtgaggccttccatgagggatcatcaaagtctgtcaagtcatttggggcggggcctaggccctcccctgtgtatctaggctaagagagtatccctccatggggaatgggctcccaaagtccattcatgcactaggggtaaatactggttccactgccagaggcccacagttttctttgtttgtttgtttgttttgttttttaaagaagggctctgtcttgtgttacagtgtcgatgaagcttccggataccttgtacctgaattaatccaatcattctaaatgatctcatttaggtgaggtacttaattaaacaaatcacaacaggaatcataacagtgattgaaggcaagaatcagagcagttgttactctgtttgtgcagatgagaaagtcctagagacccaagacagtggtgttgtagttaacaatgccatacacacaaaaattgccaggagtgttaacttatgttatacctttctaaagtcaactaaatgcctagggagtttctttacatctagatgaatacagttcttttctcttacatttccatatctgtgtgtttctaattatttattttcccacttcttttgtgtcagtgtacatacttatgtgatccgggtcatctggtagcaaagagacgatcggcatgctctgttgtgggaaactgagtgggctaagatgctgctctagttctataacacaatggaaaattcccttcaacctcctgtgacatagaagaaagctataagggtgattgtgggggtggggtgtccacttgcttcctaaactgatttcagctcatctcagtcctcttagaaaaaacaaaggctgtgcattctgctgcctggcctcgatgtctttctgctccattttcccatcagctctcttgtctgtaatatgtggtgacacacttgtcttcgtgccaaagaaaggtttgctgatgtcatccagtgactgcagcatgtccattgattcatctcctcatcaaacataaaatcagtcccaagggaactaaatggatttctgtccaggagggaggtattttttttttaatctgaggagtattacaatggtttctagagtcatattctatagtacttaatttttcttgttaaggagaatttaaatttaattttctttcttagtgagacaataatggaacacagactgggaaccattgcctctgatgaatggtaatagaattcagtcagagctgaagtgaactagaatcaagccaagaaaataaaatgatctagttttcacattttgattgcaaggtaaaaatggaaaagtagctaatctcttgtatatagtatagacgcagatgctgccttagctatgtgtgcggtacaggaactcaatccttgctttttctatccatgtcaagcctttaaggaagccttaactcatccatacaacattcttatgaattccagaaaaatccacaagcaaaggtcacttgtgtgcagggactttttcttgagacctgttactccccaaaagttataatttggagatatatagttcatcctttcatctactgacaccaggtgtggtgtctgggtgttcatttaacacatttaattagtttaaaacatgtgtcaattgaaaattttccattttaatccaaagtggaactgaggtggggcacacaaggtacatatactccagactctcaggagatatgtgcatgaccttgaggttctgagctgtggtttgccctgttcctgttctgcttttaatgaagttggtttccagtcaagtttgtttagtcagacaattctttgaaaacaaatggtcacagaggtctggaaacattgaatttaaaatttatctcatattcctctccatctactttgtgagaaaacttcttgctatgacccaggatgtccacagggcttaaattttttcacttttgtttttcagatcactactgatctaaggcaacgatgcacggacaatcatactgggacatcggcctcagcccccatggctgctggcatcattgccctggccctggaagccaagtaagccttgatctctctgtcttcactggtgacaagcccctatctctaagaactttctcccttccccagtatatgtactctttagtcaatagccgaggagataactttccatgccagtgtttaatttgtcagtgatttgggtttcaaacattttttattggcaggaatagtggctcacacctgtaatcttagcacttgggaagctgaggtaggaggattgcaagtttgagactaggtcagcacaagatacctaacaaaggatatattatgagaccctgtctcagactaacaaacaaaaaactaaaacaataaagaagcaaaactcattcaaagagaagtctggggtttagctatgctttgaaaagcaggcagtgtgattccttccttgtggagttccagtattagccagttggctgcaacagtcttgtcctaatggtttttcttttagtccggaaatgctcctgtaagccttagacaggttactaccacctccctttctggtccccttctctataactcagaaaggcagctcagagtccagggcaacagtgctgtcacagactggctcaatagaacaggatttgtcaaagtcacatgtggcaggaccccacagacaaggactacacagctttgctcctgggccatttggtcaaactgttcaacagacctttagaaaggaccccaaagcagtttgtatgtggcacttcctcttctctcaaaacagatgggtccatttgtgaaaaccttgtacagatgcaaaacctctttgcttcaatttcaaaacctaaaatgtcgagaaaaaggaaagttctcttgtaaatttaacacccagatttatgtgataagctgatttctcgccatttctgtctgtccccatcccacacactgaagatgcctctcttcagtattcatgcatatgatgacctgctggctcttcccttactggaggttttgtattatgcctgcaattaacaccatttctgaaaacaaattcataagttccacactcatctgttccaaggatttttttaaggggaatttgagggtctgttctctgaggttctccctgcatgaagatacaaagaaaatagacctggagtaaggacatcagcatttcccaaaaggagtcttgcattcctccgctgggaatgatgcaaaactcttctgcctggttgcaactagagtgcagcactagcaggtgggatggaagaggaagaggcatgaggttgaggaagcttgggccttgatgtgagaatgggctagttcatccccagtaccctaatggctcctcgacgtttgtagctgccttcctggtaaggagacaggagccaagattagtgctgccctaatacagtgtgtctgtggcatggaaagccttgcactgtaaaaggaagcaaaacaccacctccaaatagggtgccatagctttgggtggccgcccaccttagtcttttcacgggatggtagccaagttcccatgaacctttgggtttcttttttgacaagactaaatgtgaagtcactttaaacatactctatttcttaaggactggacatttggttttggcaaagaaccggcacttactctccaaaattctcactttacaacttttcacgcagtgttctggcagcagaagtgagttaagtgtctgtatttttttaatttgctggagtctgaataggattttggaggggggatgatttttttctgaaattctaggtggtttctctggaatattttcctatccatgaaatattgaagggaaataaaaccctggaattcatcaccacctcactcctccatagagaccagaatctcaaactcagacttggcttcccaacatgtgactgcttctggacatgctaagctgactctcaattctttgagaaattactgtaaccccatttttttcagtgacaattcttttcaacaccatttaagctagcatgcacaatccttatgttaagccccccactcggtgacaaaaggtcatctggaggcttcataacatattgagagagtgcatctgtctcccttgcttttccatgttgaggatttcttatcgtttgttcctgtcaaattgtcacaagtggaggggtaagctatattcttcaaatacccaaaaaccactgtattttaagagtttgagcaagccaattcaatcaggaccctataataaatggtaaataaacagtctgataaaatgagaaggaataggccttcccttgtaactctattgatttgacctacaggccaacctctgcctgtaagtaaagctgaaaattacaggagagaggtctgagttctctaggagtgggtcagtagtggcatgaaaccagcatcaggataagcacaggggttggagattgagtaaaaattatctaaaaggaagaaattgcagagaggagctcaaataacagtgtgcccaggctgcaattgctctccagctaagcctgggtgatgcccagctcattacccacttcctgagaccctagccttgcaatcttctcttatagccagtaatgatgggccctggcattttgatattcagcctttacaagtgcaagccgttggtgctcccttgaagggaaacaggagaggaagctgcagcagacagaactgctgcttgcaaggctatcttttccaggtgttcagtctgcctgcacagtttgctaagcaacagataggctgaactttcaggtcagcttgctgcaagcaaaaaggctgatccctgtttaactgcatggccccattaccctcacacttaaaagacaaatgtgtgactaggtttctgtgtttgcttggcatagagacactgggggaagctcacacactcagcttccctagcctgcttcccctcagggatttgttgaggtcactgggaatgcgagtcatgttattggtggtaggatttcctctattggcctcagctaaggacaaagaacaaatacaaaagagaatctaataagtttaacgtgtacagatctcttatccaaacttaatgaccattagatcatgaagtaatttttctgtgacagctcataggattcactaaacatcattatttttctggatatacaaaccttgcattgccacaaatgcagatgtaataagcccccatattcttaattgaaagatcagcttctaggctggttgagatggctcagtggataaaggtacttgccaccaaacttgaggacttgagttcaatccccaggacccacatgatggaaagaattaacttctataaattgcccactgacctctatagtcatgctgtgatatgtgtgttccccaacatacacatataaaaagaggttaactaatgaattgtaattttttagaattgaaaaacaaaatgtaggatcattgtctgtttcgtgagttcacattcatagattcccatcaaacactttctaaagctcttgagaaaaagatgccttctctactaaaggtgtacagacatgtttttatcatcattatgctctaagcaatgcagtacagcaacagctgttttagcatcaacactgatctaggtattagggtaatctaaagatgaatatagcttgtggcactatgccaaggttatttgcaacacagcatcattttgcagaaggacctgatcatctgtgggctctgtttgccaaggttcctgaggccagtgccccacaggaatgatggattctgttcctgagagtgcatgactcttcttctttctcttctctttgtgaatcttgcctctctggttaactaagagacgtctcccctgttcccttctacttgtaaacccatgagcaatttcaagatatgtggaaatgccatcagcctaaaggggagaaaaactaactattgtgttaagagctctcggcacatttatcactttggaaagtttatagtatgtcagtattgggattttgtagatttaaaaataatttcttggtttttcagctggtcaaataaggaatgcagagtcagtaattgctagggaactaattgctgtggaggccattatttaaaatgatatgctgtcatgcagtaaaagtgtagttcagactggagtgagtatcgtggggagtgggcctcttctagtggtgagtgtgagtgtgtggctgatgtcagctaaagtgtgggatggcaccacatctgcaggtgtgtacatccagctcagtgctcactcagagcttagactcagaggacaaatagcaaagaaagagtgacagcaaatgaagtttcctgtaaaacagtttataaaattaagagaactgacattaagaaaagtggagtacttggagcaatatgctgtgttttgctgaaaagtaatatgtcaacattagctcatggaattcaaaagctgtgttcaccattgcaaaggatccttcattggaagaacagggaatacacattcagcaatcaagaaatgtactctacatagtgagtgataaatagaataggctgagtcaggtaagaaatttgaaaattatttaagatataggggttatgccaagaaagaccgttccaaaaatccttcttttgaattatccgaaagctttttcctcacctttcatctctaagtaggctacagaataacttactttgggaaaacttagagaataaacaaataagtatactgttagtgtccctgttgcatagtactccttggctgccctagtgccttgtacacacatgtacacatgcacacaatgccaaatgggcttatccaccttatctctattacctgtctgttacttcttatttccaatggtttttagaatgtgtcatataggtacatatgaaacatataaagactatagagtattctagatgtttagataaatttggggtacggagattttcatatatagtacttccccatcagaattaaggattaactgtatttatgtttagataacaattgtattcaacactaaggaaaaaccttaaggcagtatagtacatacaaagagaattgggtacgtcataattgagttgtttttttgtttttttaagtcactagtgataaaagctaaaaatatcaccagggaagcaaatgttcaatagcagatatacacgattcattcatgaaagctttaaaaaaaaaaaaaagaaagaaagaaagaaagaaagaaagaaagaaagaaagaaagaaagaaagaaaccctcaggggaatgactgtggacagcataaaatatggttgaaaacagaaatggttacctggatgattcaaactggggcagtgtcttttacattctctgtgtcccctaagcatcccatctttaacagattcattcatctattaaagcattttgtttttctatgagaggaccgagccctaaaccagctggcagaattgcttgcttgcatgtatgtcaatttggcccttcaggtccttccattggtgtttgttagtgacttttccctcctttgccctgagctcctaagggaagtccttccacctttagtcctgagtgggagagatcatgtcagacccaggagggcccaagtgtgaagagcgtctgcaaagccaaaggatgattcacaccatctgctatggctttgaaataaagttctgaatagtctgctctcaagagattaaacaatccacaactttcataatttaaaaagcccatccatgctggttttctgtactttggtcttatctgccactgagtcttttgctttccctttccctgcaagctatcctgttggtgtgtaagaaaaaatagaaggcaatgccctaatgtatgacccacttattgtaagttacctggggctgttgagacaatacctggagtttgttacaggctagttctgagttaaaacaactcactggaagcttcagactcctagaaatgaacatagtcaggggagattgtacaagaagggcttgatagccacaagcattcctaaatagcaggattaccatctgggcaatgagatcctgtaagcaatcttatcttctttgttgttgttgttgtcatcttaattaaaagcacatttcactctgaactgttctgttgagaattttcccaagagccacattaagctctatgaattgtgcagtgggtggggagcacaaatgtctttgattgtgggggtagcattgggaaggatatacccactcttttggggggagagttttacttcacttagaacttagaaaaacccatgttcagtgagacatactgacacgggagtccagattctgtaggatcaccaggacaagggaccagagcattgcattccccctctctagttactgaagagtttcgtgcgtattggaatactacagttcagacttggaattaagctgaggtttctggcaggagaaggaagagtgaattaaaaggccatcaggaaggagagttgacaaggtttatggggttaaaagcagcacacatttcaacttgaggctgagcggacagagcagggatgtactgtcctggattattccctatagtgaaataattgtaaccagacacacagagcagttaccacaggccttctgccaggactgtgcatgaaaatagctttgttatgtctacatacacacagacaatacactctgtcctctagcacttttcaacttcaaattatagagaagccagttttccctggacttgcctgactttgtgccgtaagtaacagtttcaaccaggacgacttccaaaggtgtccattatgactggaaaagccctggtcaacaggctcattcacttgaattatcgtgagagttagccaatgtttccatcgccttcacttagatgagaaaacagcactgtgttggagacttgaacttctgcaaagacaaactgaagacagaaaattctaagggatacttacctgcctctttctgcttagttatatttaactgtatttctaatttctttcattgaaaatatataattattattattacaataacattttcaaataaggaaggtagcaatcatcaaatttgaccagtattgtatcactggtcaaatcccatttctaagcaccaaacagtaggaaagtcttatgttacacacatccaatatgtgtggaaggaggcagataaactatttggaaaattctagatgacttcaaaaagagtctggtcaaagtaagggtaacaggcagaaggagaaatgtaagtagatttgttgtatattttgcaagtaccatattcaggagatgtattagattacatgtcttgaggaaaaggaggaaaagcagactaagttctagttgctttgctgagcatagcctggtgccatttatagaaataaatacactttattctttcccatgggattctgggaattctaagaagcataaaaccaactgagacaagatgtccctgggcctagatgccttgtaataagaactgtagtaaatgtcttggattattgactggatttagtgtgccaactccctcagcagttatttctgatcatttgttaatcctcagaaaatgcctaccactgtgtttgtaaatgttataaatgaccgatagtttacttcttaaagtaaaaaaaaaatagtgaatatggatttccttgcattataaactgcatgcctgctcctgtgttctttgatacaacgggatgctaagagtagatattaattaacccttcacaggtacctaatagcattgcttagaagacttactaatgtcttgaagagtttataggaaatgtgttcaattcagtatttcaatttatctcttaggaggctttggattttcctcattgcttagaaattttcattcttgatcgtgcctagagttaatctctaagagctagaagtataataaggactgaaagccattacaagcattgcttactacttactcaattttagcaaagcctataaaaaaagcattcctgtgatggcctaccctctatgttcatccagtacccctgaggaatctatcttgaaacccagttgtaactcaactctgtttctgtatcaggtgttcttggggtgaggtatagttttcgttcaagaatttaatgcataaatactgcatttacaatatttctacctgtcttccccaccttcaacttctcatgacttattattgttagattatatatgtctatatatataatccatttagcactgctcatatgtacatatttagggcgcacacatatgatttttgtgactgcatagtcttactcgggagattggccctggagaaggctgactcctcctccatctagtcatttgttgcctatagctcttcattaggggtgagaccttgtgaaatttcccccatctatgttgtcatgtcagccaatcttgttgagatattatgggtacagcttccctgtcatgtctagaagacaatgccgagcagtaggcatcctgaccctttggctcttgaaatctgttcatcatctcatccatgattttctgtgagtcttaggtgaatgggttatgatgcaaatctgtatgtctccttaggctgagtgttcacaaatcaagagggatttcgtttgtccagtttagaaacttttattattttgttttgcatttatttcttgttttttattttgttttggttttagttaggtagtctcatatcccagactggcctggaatccatatgtagcccaggctgaccttaatctctccactcctgctgcagtccaagaagacaggcattatcagcacgtcaagatctgggttgaccttttgagccagtatagcctgtgcttacactgctttagcctatacattttactaggatatttgtttcattcattctgaacagaataattgtccatggagacactagggcctaattttagtaattagctcacaccatgtgtgtctttgtaaattctcttttataaaattttaatcatagtacattttccatcagtgtgagagacgaaatgaaaaagaaatataattgaaagattgaaaagcatgtcattcaaactgatgtcaacaagtcaattatatcatttgtcatgttgcaaatcccttacaatatcccggaagtctatagagtctggcaatgtcactcctaaccactgaagatcacaatacagactgaacatcccagatgtgaggccaaagatccttcttgtcagtgaccacacatgagtgtgcatagtgcagcaaagggcaaacaataaggcaatgaaaaatgagtcattaacttccaccaaggggatgttctttgccatatggtaagctgtattcttgattaccattctcacctaacctgcaaagcatcactccaaagcaggtgtcatcatctatgttccagatatagagaatgagatttagaaatcctcagagagtaagtggtagctttaggaaatagacccaaagtcatgtgacataagaacttactaccctgcctctttactactcacagcaaacatatgacctgattaacaaatgactgatacagctataaagaatgtgagtttagggaaaggagataaaactttgagtaggattatttagaaaactatatacaacaagagaggcttggcatacactttaaaagttagtgggtatgtggctcatgataaatagtttaaagcctacaaaatacttaagatcatctagttccaaatgacccgtagatcacaatgataaacccctataggcataagagttagtatgctacactagcccagtgactagcagcttagtgggcaatggtgcttgtacacaatgagtgagtgataacagggagggagggagagaggaagggagggaagtaagaaaggcaggagcagagatggaaggagtaaggaagtcaagaagtctttttgcagtcattcagtgtgtgtacaggtgtcagtttcagagtctacaaacagtagactactgtgccatcaagtttcatttttagtgtgaatgttgactgtatcaagaaatatttgttgagttgttcttgtggctataatttattgtgaaaggcacaagtatgagatggtaatgtatcttacaagtcatggtcacggatatataacatgatcattttgatgtcattgagcctgtgcccatcactgtgctaagaactggaatgcctctgagcaaacatacatggttcatgctgatagtgcagggtgagcaagcacttaatgtgtttggttttgagcctagcccctatattcctattaacagatggaagataattatgcctggtatggagggaaaaaactacgtcaaggatatgtggtagtgattgtggtttagaataggaaaggaacattaatgataaggggtaaggaaagccttcaaagaaatgatcacatccatgctgtggctggagttacagggtagtcatccaacttactttgtccttggctattgtcttagttagggtttctgttgctgtgaagagacaccatgaccatgcaactcttataaaggaaaacatttcattggcactggcttgcagtttcagaggtttagtccattatcacgttggtgggaaatatgtcatgcacacagacatggttctggagaaggagctgggagttctacatcctgatgcacaaacagcagatgcaactgtatactgtgcatagcttgagcatttatgagacctccaagtccacttgcccagtgacacacttcttccaagaccatacctgctaatagtaccacttcctagcaccaagcattcaaacacatgagtctatgggggccattcctattgaaactaccgcagctgtctttagtttttatttaactgtttgatggccacattaaccacatttcatctacttcctctactagtaacttgccatcatggctaagacttaaaggaaaaagccaaatagtgaaggaaaaagccttaaaaacaacctgtttgtatgattgaaatcaggctgataactactggcatcacttcagagattgaaattgtacatcaagttgtacaaatgtaccaaaagacctatgtttttgttcagtgggcattctaaatatctaaaatattctgtatataactaggaaataaagaaacaagggaagagactgagtaactctcaaggcaagaaggtgtgttgtcttcacagctctgggggcagccttcttgcagaagctatgagtaacctttacaaatgacctcagggaatgttgcccacagacaacttccaggagagagggctggattcctgctccctgctctacacttatgtgccattggaagaggtatttaatcgcctcactttctatagcagatgtgttcaattttataattttcattgtgttacaactctcaattacatggcatcccaaacctgaaatatgaaataactgttatcagtttgtctgggaattgtataacattggaagattgcccagagaatttctggtctgttgggaagcatttcacagagagaacagtaagagaatggaggccatttaagaacaaagttgtatttgggaaaaatacttttaaagcaagttgctcactgtgcgtgtaaagttgtgttaacaaatgtggaaatgcttgcacttctacctttgttagccaaaaaattggaagttaccaaaagtggcattagttctcacattgaaaaatagtgcaaaagtctttgagatgcagaagattgggactttgttgtgtatgagtgtgtgcatatttgtgtgtgtgtgtgtttgtgttttaattaaatgtttaattatcacaagcatgattaggtttcattttggcattttcaatcacttgtttttgttaatttgcctttctggttttcccctccatccacatgaacatgccccacgtgtctttccaaccccccccccgcctcctttcttgtcatgtgtcttcttgccactagccccttcctcagtacctctttttcctcactcatggtcttctttctagtttcataccgtatacctcccctctcccccactcacatgctaagctaggatcagatcatgtgtgatagagaatataggacttttgtctttctgagttacctcacataatagactgctttccagattcattgattttcctgaaaatttcatatcacttttcttcacagcttaacaaaattccattgtgtatatctgccaagttttcactgacattcacatgctgataagcgctgaggctgattccattatttttctgttgtgaataatggagcggtaagcatgggtgtgcacctgtctctctggcaggatagtgtcctttcggtatgtgtccctgaagagttttgtaaagggttctatttttaattacccaagaagtgacctcactgatttctatataggctatactagtttatactcccactagcagttaataagggttcttcccacatccttccctactatggttgttggatttctcaatgttagccattctgactaagaggagattaaatctcaaagtagctgtaatttacattgctatgatgactaaggatgttgaatatttttcaaggtttttttttttgagagccgttttattaatgcatgctttggttggcagagaatttggtctttaagttctgcggttctttgtgtattctagatgctaaccctcaatttgctatatagctggcaatgatgttctcccattatgtaaactcactattggctctgctgagagttttctatgctgtgcagaagctttgtaacttcacgagtcccatttgttagctcttggtgctgtttcccgtgcttttagagtcccattcaaaaagttcttaccttaccctatgtcttgtagtgtacccttgtgtttccctctagctgtttcagtttttgggctttaaattaaagtctttagtctacctttaatttatttatgtacagagtgggagatgtggatctatttcatttttcttaggatggctattgagtttttttctgcaccaatagttgaatagggtatcttttttccattgtatgtttttaacagctttgtcaagatgttaacagtccataactgggcaggtttattccttagtcttctatgttgttctataggtatgcatatctgtctttgtatcagtactgtgtggtgtgagagtatttttttcttcataatggggcttgtaaacatccaaatgatccttccagtttgccactggagcaaactaacattcctttaacactgacagatgcctagaggagcactgccagtgttattatcaataaggaattttaaaaaccaagatgactatcaccagagtgctgacatagcctttaaaatagataggtgatgttaacatatatgtaggtatatatacacatatttacatatatgtgtatttacatatatgtaggtatatatacacatatttacatatatgtgtatctacatatatgtgcattccctgtgcaatcgattttcagcagcattttttagacttgaatggtagtgtaactgtaaatactgcatataaatactgggttcaaatattcttaatatccataacatttattttattgtgaaattttcccatactttattatctttaacttgtttgcatgatgctctttcccttcagatcttagttacttcttacctcccctcttttcctcataactatattttcaatgaatctttttggcaaaataatgctttaccaattaaatatatcatgcatcttattgtatcactttccaccttagttcttgagacagcctctcgctgatcctgaagctcacccattggctatattgactcaccaggatcctcctgtctccacctcccaatactagtattattggctcttcctgccatgcccatctttgtacatatccttatggttatgcactaagccatctactaggcccttaatcttggtcttattttcccattcaagaaaatttctctgaattgattagatctttttatattggcataataaagttctgaagttatctttagttctgtttgaactagcaaatgtttgcttgcttgttgctataatttatgcctttatgcttatttctaactgagatacctgttatatttgatatatgttatatctcaatattatattttggttttatctgacagtagtattactcatctctattcatttgtgatgaatttttcctgtttatttttattggaaagtattaaacacaagtcattgctggttcagatttggagccaggttgactctagttccagtttgcctggacagtcttgaataaatggaacatacccctttcttgagtcccagtttcttcacatgaaatttgcaacatctgtcactagtattaggtaaatttacatatatggaaaatacaaaagatacagaaactggtgtaataataatattcttctccatcatgccagtcaatcatgctgtgttaaatgtcagggcaactatagtcattcctgtggcagttgttttgtctctgagttatatttaacctttttcactttcagttgacattttgctttccttgtgtgttcttcattgtgcctatgaacaattttttacttcattaaggtttcactatgaaggaaatgtgttcctctcagtatttgtcgagatttagatatagtttcccatgcacattagatctgttagtattgcttctttagagtaatggatttcttcatctctgcttacagtgatgcaatgcttatttctttagtttgttgtccatttccttttatcattttttacttatgtcttttactaagtgagatagtttattttactggcatcatctcctctccagctctctctacctgtggggtgtgtgtgtgtgtgtgtgtgtgtgtgtgtgtgtgtgtgtgtgtgtgtgtgtgtgtgtaagtaagtaagtactctcaatcactgagccattcccttaatactttttatataaacaatcttctttctgtaacatgataaatgaatgacccagagactgatattggggttcaggcttcaagctgaagtacagaaaagcaaagtagcaggctgctagctcttaccactacctggggatgtatgggctgatcctgctgcctctcttacagcatggcagaagaatgaatgccttctatcctcaatgtagcaggagaatgaatgccttctactgacaccctgctcctgttgtatatacctctctagtgctgggattaaagatgtgagctctgttacctttttagactgattcaatcttatgtatccctgggtggccttgaactcagagagatccatctaccttttaatcctgagtcctaggattaaagttgtgtaccaccacctcctagcttctggctgctgggattaaaggtgtgtccctggcttctatggcctgtggctgatatgctttctgaatcctcaggcaagctctaataaatgataaataatgtattacatctttcttctgagataaatggattaaattctccatactactgtggtttcctcagccaattcatttcctcagcgtcttgttcaaccatcttgatgcacaaaagcatataatagctaatagcaagcttttagatagcacacaaatttgacctgtgtgtctcttcagtggtgagttttttttttcctaagttgtaatgttattgtagataatgttatttgtcatccatttgtagagaaattatgcttggtgctttcatattttatgcagtttataaaattgatattttaaagccaatgtgttttacgacaggaagagcatttcctttgatttatataaagttgggttacatttactactcttctatacttattccccccatctttaataccataatcttcatttctttaacaggacattttagttcatttatttcctactataacttttccattcttctcaaaaaaatctgctgaagcaattgttgcatctcatgcctccacaccagtttgctttcaagttatcctcagttctctaatgataagtatacactcaatagtttggagattggacctgtttcttcatggggtaaataagctttgaggcattagtgtattttgttttcagagtatatgtgtgtgtacaggttaatgcaagtccttgtggtacatgtgtagacaggttagtgcgggtctgcagggtacatgtgtgtagacaagttagtgcaagtccttgtggtatttgtgtgtagacagcttagtagagatccttgtggtacatgtgtgtaaacaggttaacgcaagtgcttgtggtatatgtgtattgacaggttagtgcaaatcctcagggtacatgagtgcagccagtttagtgcaagggtacatgtgtgtggacaggtccccagcactacaaatacatgtcatctgctttcactggtgaggtatgggactagtctgaaactcttgacttcctttactttcagtagaacaaattatttctcattctctctaaaactaattttccagatcttaagccagatcatgctttgtttaggcttattctttttaagttcttagttaaggcattcagaattttgtctttatatttatcatgaaatatatacatttttaggactaatggcgatggctgagcctttcccctccagccctccttggcttttctcagtcacctttgactttgataacctacaaagcccacttgaagcctgaaagcctgggctgtggaggacaacacctggcttcaaatccctgctttagttcttactagttattaggctttggaaaggtgtgaaacctttctaaaactgggtgtacttatctgtaaaagggactcaagagtgcttcctgtccacattgagtgaataaagctcccagtgcagcacctccggaaggcagtcagtcatcagagggaagctaagctgctttctgaagtttggtttctgtcttctctcctctgaatctaccttccccttttcctgttcacctgtttcctaggaaagcagttaggaagttctcgggtttgaattccactcagtttcccacaggttggttctgtcatctcacctcagtgcagattagccccaacccaaactctgcccttcctgatgccacctgacactttgcactgtggtcctgtctcttggctcactttggttttcaatggatgctttttaatctgcaagatatgaggcaggagggttgcagtgaccttgaggctagcctgagctacatagcaaaaattcttagaaagaaaacaatgtaggatgctcaaacagcaagtctccatcccaggtgtcagtttagaaactcagagacaccaagaccgacaggtatggtgtcttctttgtcttcgttaatggtgctccagcactagctttagtttcaacatcttggtgcatataatacaggaaggcaattggagagacaattaagaggcattgtctctccaatctcttcagcataagcatctttataataccaccagacattttgtgttagatttctgttagtctttattaatttgttcccgtggatgtgtgtaatatgcaaattttcaaaattctgtgtttgtttccattgatttacaataattagaaagactgtcaaagattgatgtaagtcaggagtttctgaaatgtataataacatttccttcaaattctagaatacaaaatgcttagtgatttctcagtcaagtttaaaattaaaactggatgttgagagatcttgtctaaaatatgcttctagaatgagcatatagaaaagcattttttattttcacatttgtttatttgggggtatggaagcatgtcactctgtgtgtgtgtgtgtgtgtgtgtgtgtgtgtgtgtgtgtgtgtgtgagagagagagagagaagagagagagagagagagagagggagggagggagagagagatggagagagagagggagagagagagagaaagagagagagagagagagagagagagcacttgtatgtttgtgcatcatgcaggtcagagaacaacctacattggggacccagctctctccttccaccacatgcgtaacagggatcaaactcaagttgttaatcttggtggaaaagacctttatccactgagccatcccagctgaaaagattattattttaatcatttatatgtaatggggaaaagtgggaggaaataattgtaacataactgagaggaacagcagtaacaacgcagactggggtgtaactgagagacagagccctgacctggcatgtacagggaactgggttccatcctggtgctaccagtatttattaaaattcacacagacaagttacaagctctgcaaagctctgcgctctatagaaaataccaaaagcctttcaacctgacagtttagttaatgagtaagtgtacctgcaatgccatcctaatattcaatgctatatagcaccctgagagaaaaccaaagagaattcctcccaccttccaccacagccttgtcagtggctagccagcaagcctggaagacctcccacaaacaccaaggatgtacagattaggtacacagtgtgtttgttcaccagcttaggagaccactaactactccagggttaaagagatggttaaaaagagacctttgagacagatcttagtaggattacaattctactaagcagaaatataccaagtgccaaattgttttaccatgtgttagagaatttaaacttaaaaaaaaaaaaaacaacctgagttgagagtataggatccattatagaatatgtagtttgataacatgagctttgtctggtgcttatgtgactctatccttctgagtttgcctgatacagtaggttgctaatttccaaaagtcgcagctgactgttgctttggggaacttgtttccctgggcactttattctagttattacctccaaatattgcagctgcattgctgaataaatggtctatctccacactaaagctgaggaaataatttctgccactctcaattactcaaagacaatgcttattattttttagaacaaattttggatgagagattaaaaggagagaggtatggttgtcttccacaggcctgagtcaatttacctagtgtatgtttattcatgctatacctgaagacagaaggtgaccaggaacactgcatgggcacacaagtgtcagtgtatcaagggtatggttatagtgttacatacttcctaccttcaaggattttaaagcttgatgacaaagatgagaggcagatccagattcagggttgtaggttgaacagagatgccctcgtgcctttggggtaaggatatgagggcatcagtggaaaacccaccatcatgacttctctgctgtgaattctgtttacagtattcagcatcttcaggtctaattctgcagtaatttattcagcaaagtatgtcaaggaagaagtgaccattgagcatacaaaatataataaccgttttgtgtaggggttttaggaaacatacttagtcttttggaacaataacagatacactcggcgatgaagtaggatctgtaagggcaaaggccatctcagggtccatgagaaaagtttccctcatgtggcagaggctgtcttcctgcatgtgttttgagactgggtttctttactttggttagactgaatttatagagcctgggaatggtttcacagcaaagagaaacaaaaacttgacttggtgattgtgcctttgatcttttctagtcttgttcaggtgtaaatggatcatacatggatcaacagggaattcctatacaaatcagggctctaaatgttgacatattagaaatcatgcttttctatactacttgattttagagttaaaactttttaagtgtgtgtcatgtgtgtgcatatgagtgagtgtgtgtgtttatgagttgagtgtgtgtgtgtgtgtgtgtgtgtgtgtgtgtgtgtgtgtgtgtgtgtgtgcatgctgagtgagcccatttgtgtatgtgaaaaccagaggtcagcctaaggaggtttcactccttaggcactcaaccaccctttttttgtgagacagagtcccaaactagccttgaacttctcaagtaggctaggctggctcactggagagccccagtaagctcctgtctctgcctcaccagtcctgggattacaagtgcataccattgtactttgcttgtagggctaggacttctgaattagagttgaatgcaaaacaaatgcatcccactaggggatggagagcctagcaccctttctgggtcctgacagggctgttggttgcctttactgaatcttctgtcatcatttgtgtgcactaactgttacccttctcagcaggctttaaacacatacttcctcatctttcataacctggctcaaataaacctattctcacagttactaatttcttaagtataggtgcaatgacattaacttcctggctacttgttcccatttctgttttaggcacactatgtaaggaagccgagtgtgctttggttggttttatttaattactgagatagttggatgattgctgattggccctgtagttgtccattgagccaggtggtaccttgtcatttcattatagagaatcactttgactctagaaagatgatcctttcggaagcaactctcattctctggctttgttttctcttgttgataagtttcttttgtggagaagtgtcttgtcccttttgtcacttacctatgaactaatgatgaagactatgaatatgattatgatggatggatagtggtcatgatggtgatggtggtggtggtggtggtggatcttttgtggggaatatgaggctcttattctcttgaaaaaagtgcaggtgagacggtgcctcgggcttcattttggactttgaagaatcactaaatgcaagtttgtttccaacactcacacatctgagaattatttttcaagaattcttggcaagtgacttttttttcttttctaatgtaagtgctagcaattatacttaagagcttaataagaagcattacacaaaaataactcttttgggacatgttcgcttattctaaatctcatagtgagctcattaaaaactttgaactgctggtaacaagaacattgtatgagcctgtgataaccgtagagtcattgtcctgcattaatggctggaaactagtgacgcttgggggcagattgagctggtcaactgaggagcttaacaaaccaggctctgaggcacatcaagtgagatcctgcaaaggaggtgaccaattcacagcaataatgttataaaattatatgataatgttgtatcatgtaaatgtgaactacatttaaaagacttgaattttctggtatggtatttttcttttgatctttgataaaatgtgtaagagatctttcagaatttgcaaacaagattaagactcaagaattttcttaatatgatagtgaacaaaaatcaaccaattgagttgagacagcatatacacaaaagtcacatgactgtaaggccatgacctgaaatgtttggcttcttgatttagaacatctaaaaacaacctcagaatccagaatatatccatccttctagcagcctatggatctgttctggaagccacttatctactgaataatgggttgaatgttaccggcaaagcctagaactttggtttctggctctgcctttgccacctctacttccttgcatgactatgcaattagattcttagtttcatattgggggagaaatgctaaagtgaatctccttcatcatgaatctcaatataacgcaacaatatgctgcacatagcacacagggcctggtcttagccattactctctcaatgttgtttattattacaatgtcaagcaaagaggaaaaacttttcaagtgagaaacatggcttttccagaacttctcaggaagtcaagtacatttcagcactttgaaagatcacagggaactactttttgctatatattgttgaagtgtaactagtggtgatcacaggatgtagccactgtagctcttagagggtggtgactagcaagctcaacatgagccatcttctccctttcggtcagctaaacagttgccctctctcttgtaactctttctagttgcactcagtctgtctgcttttcagaatgggatgtttggggttttgagtccagaggaatctagaccaaaggtatttgtggaaggatgtgatttccaagagatcctgtattattgttgtgcctggggctttccctgggaagtgtactcagctttcaatgtgtgtacgtaccagaatgttctcttaccaaatctttgaaagtctgacatggtcttcacctgtacatcagtcctgggaccataagtgagaatatgaaaatgcaaatcaggcatctgcatagtcaagagtccttcaagtacttccagttactgtagtctactgtctgtactcccagtgactacagtctaccatctatacttccaatgactacagtctaccatctacctcggttaagctgcccctatttcctgagctcattagttagttttcttgacacagacagagtgccacttattccaaatccactgatgtcccttattttcttatttgtatattttgatgcacgcattaccaggtgtcaaagtaagattatccagccacctctttccaattctgatgctgggttttctaattacaaatattccagaaactagtttttgtaactcaacatgagagcaagtaactcaagcaatttcttcgggttgagttgaatgcaggagacttcctccatctgccagaacacagccgcttcaggtacaagataagtgttccacgttgaatgacttttatattttagcacttagtgaactaaacataaatgtgtgtctccaatgttcagaatcctatgctgagtttttctgagtcttgcagggaacatagaaaacttacttcatttctgttttcctgaagggtaatgtttaaaatatggaaggtctacctgtgtggttaaagataacttagaattatctttaaattgctaggttggtttaggcagatacaatcatcaaacccatgtgtacttttcattgttatgctgtttacacatgaaaaaaatgtctatttgtttggggaacactatggaaaaccataagtgagcagctggaatgtctgtccaagctgggccttttgttgaggcttttgccctgctcttaagcaggcgcaccaaaaaggaagttcactgtgaacatcgtatctcaggcaaagcagatatttatgttgagaacagcattcagagtgggtttctgcacatccctgacagcactgcaatgagtcttctgagttatcatgtgaattcagtgcagaacaacaaagggccaagtcaagcctttcactgacataacctttcaaaagtcattctggtcttagcctctgaaaacatggcagtggtggttggtactagctctcagatcattttttcaggcagagagagagcatgaggaaaagatatctacactcaatagttcttgtctttccctgctttcttcatattcagacctccaaataagagcaacaggttatctgaacaaaatgacaagctgcctcctcctcccaagagcttgttgtgcaccaggcaccccatggagtagttagcattactttaactgattagtggcatctgcattctaactgaggaaattaattctttgtagagattaatttcacatagaaaaggaaagagctgccgtctgattactatgtgacttattttgggggggggtggggaggagagctgaccaaattgcacatgtggtagctgtggttgggacaaaaagtagctagaagcaaaacaatgacatcaccattaactgttagtcacagttgataagttctccctccctcggcactgggatgtgagtgtgtgaggtgggtgtcaggtaacttccacagagttcttaagtgaacactctccaggttgttgaatcttacaaattctcctaaaatgaaggtgggggggtgaaaatgatgaaaatgatgacaaaggccatgtgataattattaccagaactttcaggtgaaagataatagaggtggtgagatagcactgtgtgtaagggtttcacctctaagcctaatgacctgagtttgatcccagaacccacagtatagaaagagaaccaattcctgaaagtcatcctctatacacacacccggtagcactggagatcacagagaaaggtaaataaatgagaaaataatgaatttttttttaagatcaacacatctcagacttcaagactgaagaatgcactcgtgtccccactatgtctagtgtctgtttgtgtacttgtgttctttgaaagggacccagactgtggacccagactgtgttatgctgttcttgggtttgttttcattgcattttcagttctcaaacaagtgtggcctgttcagtcgttgccttgtgctcttccgtgtgatcaaagcaagagtgctctcctatcctctgcaccgtagagccagatctcacacgtatatttagatagaaggtgaaatgtttatatctttagtaaactgcaaattaactgcctaatcatacaattaaaggagggatgttccaggggccttctctttggacttcgatgtgtctgatggtgcatactctcactcagaggaccgtaggtctctagtgagcagccattttgttgaggaagtgggaaaccctcaccgtctgaccactgagctgtactgacgtactgacttcgagcatagtacttctccttacagttacattttctgctgctcacagactgacatcatgtctccacactgagagcaggagtggcagttggcatttgattatcccaaacccacatctctgtcccctgtttttagtactttgccattttgattttgctttttgaatttgcttgtgactctctgcttcccccatctttttttttttttggtacaatgattcttaccttgtctttccccagtccgtttctgacctggagagacgtacagcatgttattgtcaggacttcccgtgcgggacatttgaacgctaatgactggaaaaccaatgctgctggttttaagggtgagaacttctttcatattctgtcacaggcaaaatattttttttatttttccccaattttaaatggagagcaggaaatggaacccttcaaacaaatctttaaattttgtgctcacacatgaagagctctttggtcttttagtacataaaaggcagattgaattttttttaattagaagtatacacacatggcagatttcccatgcttcccacatcataggtcaagtttttaaagagtcagccaactcccaagtataactggcctttgggactcctgactgccttagtatttgctgtcgttgattctccaagtggtatttttataactatgtgtttttaaggtctttatctttacttcttcatatataataactggcatacatttctcactgtagtctagcaattaagctatgcattctgtaatggattactttaactagctttaagactgccacaagccaaaaagcagacatagttttacaaataaacccaaagtgctgatgcatttcctagcgtgcagtccctagaacaaacacagaatgtttcttcccagagctgaagcaagttatatgtccttcgagtactcttcctaacagtagccatcatctttattgtcacaaataatatgtaccataataaatagaaagtaattacataaagcatttcttaaaaaaaaaaagagtatgtttactcaagttgcaaatgacctaaattctaacctatggagttataaaaataattactttatatccagctacagtctcaaattttttcccaaataatgttagaccataacgtatccctctatggagaaaacagtattctacagatagggagtatgttaccagtggcagttctggcactcggaccacggaaaaatgatgactaatcctgaggaaatcattcattgtaagatctgcatttaagcattatggcatctgaatgtcatctacatgatataatacataggagtttaatattctcttaggatactatgtttgctatacttagatacttatgccaaaatgtgaatccatttaaaattctttgcagatagctcgtggtaaactcatccttaatcaggactcatgaatccatcatgtattcagcatgtatgaccagttacttaatgtttttgcataattcactctttatttagcaaaagagtatccctctgctctgcaagtgtgggccttcccttggctgtgcactacacagagcagcatgtatgtcagtgtgctccttatactaaagaactgtaaacacctgttgctatccctctctgagaagccaatgtgaagatgctgcagtctcaaaattgcaatcatatgggcaatatgaaaattattgaaaattccagctcttaaaaaaaataggatgtaaattgccatatatatgtttcatgttgattagtgccagcctgcttctaagtcctactagataaagccatgagctgcacttgggggaaagggaccaacatgtaaccttggctggagggaccttcttagcagaggggcctcacagacaaagtacaatgacctcaatgaagctgaagaatcaactttaacccaaataaacttcccagttttacttactcttttttggcaacttaaaaagagcaaatggttctgataaagcactcagctctttggaaatcctctgttagttttggagaggggaaaagaggggatttaaactaaatcagcagacccaaacgtggatttcaagggactgtacactgcttctggcaaggaggaaattgtattttactattgcacgtggcaatatttagtataatatttctctcttctcttagacggctgccaagagtaacaattaaagttcattttttcatagatgaattactaggaatggtctggtctcccagaggaattgttttgtaattttgctgatggcaagccccatatttcatctaagcatgatcataataagatgaattcctgcaaagttattttcttccttgttttaaacattactatcccttcccaagtgtcccaccaattaaagggactagggtagaggctagcaggaccaacatgctctggagaggaaggaatgtagatcaccagagctggagaaaaatgaactgactttttatgaaacagaaactcaaagaataaaaagagctaatatttaagagagatttgtgcagtgatagctcagtgaaaattcgtggtttaaatcagatccaccagcagtagaggccttgccttgcagggcccacttttccccttagacaagaaagagcagcatagcctgtagcagaaaccttgaccatggtgctaccccacccacccatctcagtcttaacactgcataaaacatatacatgaaatgaatttgaaaactcctggatgagttaggctgggtggcacatgccttaaattccaccacttgggtggcagagacaggtcaatctctgagtttgaggccagcctaatctacatagtgagttccaggacagacagacagacagacacacacacacacacacacacacacacacgaaagaatgaaataaaaaggaaaagagagagaaagtttcacagattgcttagtggctaccgctggaatgggaatttcaggatccatgtcagaatttccctttctcattggggaaagcagatgccaaggtttggacaacttggtagtcttccctatcctgataaattcagagaaaccaacaccctatgggaaagaataactgtctctcaccaaaccctcaagatcagactcacacttcctccctacatttcttcaggagtacctgtatgccacacaccagcagcagccagcagagccggaagctaaggaaactataggagggcaagcctctcctcgatgctgacttcatccatactcagccatgtgtgctgtgtgggcctggactagggaagcacatccctactcttgtagcagctgctcctgtgcacatgttctcagtcaaagtaggaaggacagggctctctggaaatgcacctctgcctctcttagtgtcacactggtggctgtgctgcagagaaatgttttttctgtgctcctaccatagcagtctgcaaatggccccatagcaagatcagttcaacagcagtctgtaaatgcctccatagcaagatcagttcactgtttggaaagcccaaagacagtagccatagtcaaaaaattctatgactaccacacacccatgaaagactctgcttgagaatgtacgaaaatgagaagtcattcatcttacagcacatgtgggattctgtcagtaatgaattaaaatgcaaactctggggtcccactgctcagcaacatccccaaagccagaagatgacttaagcatggccggcgttttatcaggattagtgccccccatcccatctttttcctcttataaaaagtctcttttgttttggtcccactcatttaatcctttaaatacaccagtgatctttttcaagagctttccccacccaggtggttctcctcacagaattcaatggctactgcctcctcatttgtcgattcctaaggatgttctgggcactttcagccctctagccagacagcagtagggaatgtcaggtactatgggctagcataatttacagacatagaagttgatgcgggtcttttgctttgggaagatgggcttcacaccctatgtagactggactggccgcaaacttattatgtaggccaaagtggccttgaacttgtggcaatcctcctgtatctccttcctggatacagggctatatctccaagcctggcttacacgccctacttttaatcgcattctaaccctgacaacccctccaggccatactagacaaaagtactgatagcactgtccttggccacagcaggaagcacctgaagtctagagcacctatcattggtctgatgtgtattttgacaggctcttctagcattgtcacccagaagactgctgaagaggttcatccagacatttgtctatagtctggggagcagagcattgctggggaaaacaatagcttttcttgggctctgctgcattactctgaggagaccacaaccagccaagcttctggccatgcagtgcccaggctgtgcagttgattcttctccccgaatcccgaactgtgctttgggggtgtggtagtgattctatggaatgcatgaacatctctttgaatcaaagtatttgtatttggatgatatgactgtgtacagttaaactctcttatatctaggaacagaagtagatttcagataataaattaggaccttctgtcatctttactaggcgaaagaatgaaaaaaaagtcattgaaactcaaaaaatgaccactaagtgagcgaggttgccacgccctccatttcactgccctcccagactatgtaagtctctgtttttctaccagcatgttgctgaaacctcccccgtccccactgactctttcctggaccacaactaaactactagatttttatttttttacttctaaccggttacccacaatggtaaaaatgattgatatagtctaacatgacttcttagcctctcagaccttaacttttaatcatcttttttacttttaattgccatcactgtatttccatcagtagggaatggtaggtttaagatattacaatatatttttagcagctacccatctttcagtttgtaacacttattaaaaagaattagaagtactggaaccattaagcataccatgtgttaaatcaaaatgaaaagttcggatttgatttgtttttgttttgagagtatgaagtgatttctaatgtgttgtcacttgaaagggtaaaattctatttatgttattatcccactgtttaaataatgttgcatctctactacctgccagtagtcactgttggcatgtgatttatactccataatgcttggatgcacagtactcttaattggcatttcatgtttttgaaggaagggcaaagtggcatgctattcatctggccagcatgaacaatgggattagactcacatttgggagtctagttagaacccaattgcagacgtaggatgactgtccctgtaaagtagagtggtagactcatttcatccttctgatgactttgcttactggaaaaaccgcttgatcgttttcctcattctatgttttctagccttgtgttcattgaacttacattcttctcatatttagtgattccgagttcttatatttattgattgtggtgtacgtggtcatatctttttagcgcacacacagaagaatgtgactcacacactactgagggatcttacctttattcttttgtctgacggatgatttacctagacatctatatggtaacactaagtccctgacaggaagccctgcttagttgttacttaatctaaattcttgtctccaaaatgttcacttttcctttctgaatagctaactattaattatgtgaagcttaaaagcattttcagagaataaaaagtatttttctccctgttgatctgccactgagtggtagcattgtactggccaggcttgtgtcagtcatgctttgctttggttttgtgttcttatgagtttcaaaggcacgtggtattgtacttcaaaatccaccttcaggacttcaaatgtaactctgaaaatagagagtttgcctaacgtgtaagacactgggttcccatcctggagggcatgcatgtgtgattctccccaatccatccccgtctgtttctctctccctctccctccctctttaaaaacagaactaaaattgtggttgcatagtttgcctgttagctctatgccagaataatgagttatttgaagagagttataagagtggttttgtggattttgtcacactcttaataaccaaatggcaagtctgtggtctttgaagaaacaagtccaggatttgctccttggcttttttgcagaatatgggaaccgatgataaatataatgaaaagaatgaatcaaataaaaagtggttgaaaatagaaaataacaagcatataaagattcataagggtctatttactccaccccctgaaataagggtaaaaatatagaaatatgctgtcaatgagaatgtttggggggttgaaattaactaagtgaatgcaaatgggctagaaaactttgtgatttctgtctttaaaattttcctcctgcaatcctttatcaataataacacaacactgctagtttttatattgtgatgtttaaacgtcactttgaattcactctgaattcagtctgttaaacctcacaggttctaattaattgcacttccataagaagtgataaaagcctgaaaagaaagaaaaacccttactgactctttagctattaatatgccacataaaattgcaagcagaaaacttggtttggcaatgtgcaaaagcttctacacttaagagaaagttgacatctctgtgtaattccccgaagaaactaaattactgctttgtgagaggatgaaccaatgtccctggtcatttttaactcatctcttggcacaggtgttagactccccttaagggtagtagattgtgatattttgtagtgacatttggtatctcaggctagtataaaagccgtcaggctcttatccccaagattcgagagtcattatcagtggaatccctctctggtctaaaatgcatgagggctagaaagtaatgaaatggattccttgaaccactgattctgaatccagttccaaaataaaatggaaagaattgaagtcaagatgcagtcctatcagaacacattcacacatgtcattgaaagactgttttgagagctgggcgttggtggcacaaacttttaatgccagtactcaggaggcagaggcaggcagatctctgtgagttcaagaccagcctggtctacagaacaagttccaggacagcctccaaaacaatacagagaacattcttcatggtagtttcaaagcatttaccagtcagacaatctagggttgaatttcagtttatatatatgtagtcattttcatatattcttacccactttattgagataaacttacatgtagtgaaatttctgttttacatgccctgctgataaattttgacagaaataatgccatcacctccatcaagatctaggcaactactgctgccctaaaacttcctatactccttccttgttacctgtcctgcaactacacaatgcagccattgttctaccctctgtcactggaagtgacatgtcttgcagactttatatcaataggattaattaagtatggcttccttagctctaatactttcagatacctttattccattaattatgacatgaggccatttctttttactactaagttgtattcttttgtgaatgccacaaatctgtattctccttcacttttccatggatgacttttcttgtgtgcaatttggggtcattgtgagtaaaactgctatgactattaatggacaagtctttgtagactttttttttttttaccattaactaacttcttattttaactcagcccctgaatgtcaggctggggtggaaccaaatgactaacaagttataggccatttcaggtaaaacaaataacatgtacaagacttgtctatgggtacaatgaattaagcaaagggaacaatgagaaaagtggtggcatttaaagaatttagcactgaagtctgatagtatataccttgggaggcagaagctaaaagatcctaagttctgccagcctgggttatataatagaattctgcctttaaaaaggacagaggcgattttggtacagtttttccatcatagcatgtacttaagtaaaattatttatcatctacatgtccttcatagtttaatataacatgttcggctaatagtctgctcatgtctttggatttaaaaattggccatgtagaaactggtgtacatgaatagttctaggaatagtgagtgacctgcatgtttgtctccatcatcaccttcccatactacctcactccttttctattagatttgtgtgtgtccagctaaaccttgaactgaactgaaatccagatgcagagaaggaggactgatgaacagaggggtccagaaacccctgaatgtgggtgtcagtgaggagaccttggaaatctatggggcctcttgtagtatatcagtacttaatgctaccatcagaatggattttgggagcccatcccatatggagggatactccctgagcctagacacaaggggcttggcctaggctctatcccaaagaatatgacagactttgaagaccccccctatggaagacctcaccctccctggggagcagaaagggaatgggataggtagggtgttagttggggggggcaggagaggaggggatggagagggacctgggattgacatgtaaaataattttcttgctaataaaaaaaaaagaaaaaagatttgtgtgtgtaaatacacatatacatttacatacacattccacaacacatgtgtagagggaagaggataacttggggaagttggttctttctaccctgtgggttccaggaattgaagtcaggtggagattgaagtaagatggtcaggcttgaagaatcttactcttaccactgggctatcatgccagccctagccccactactttatagctacatatctcctgtatgctgctattctcgggtttttctgttgttgttgtctcccatctgacttcttgttttcattatatattttcaattactttgggttgaagattctaaataaatggttaacctccttgtttgtgctttctgcttttcatgagattacttggatgttgagaaatgatgaacggactccatggtgtttcagaaaacaaaacccgatggtgctgatgagttatatcaacaccatgaatcagaagtataaataaatgtaatgacaggggaggggaatctgagagccttaagatcacaaaacttctaaaaaccaaaacttgtcataaatggtgtcttgacttgttagatcaaaccagttctcctgttgtttgtatttcctcggcattgtaatgggagaaacagctttggtaaatctgcagttcaggggaagcaagagaaatcgccggagtgtgatgaaaaggcaggtgtgacgtgataaggaaaatgatttaaagaaagctgagagcaaagctactttaatcataaagtggggagttctcttttgattgaagtacatttttgaaccactatagtgactcaagaaaatgagctgggttatagcaatgacttccaagcaagctgattctggagagtactctgatgccggttttatttcctgagttattgatgtgaaggcatttgttctgtgatatgtcctacacaatgacatgcacataacacatgggcatgttccttgccagtgactgttctccattgtctcagtaagtagttatgtactcttgaccttaagacttctgacatttgggggaaattgttgtcttctgttaacctccttcaaaatgaggacagttacagatttgggatacataatgatctctgtcagatcttgttgttgccttaaaggatattttttgaaatgggtttttaataagcccacagtaaaggacatggtaaaaaaaattgcttttgtaaaaaatgacaggccagaaattaggctttgagaaggcttcacagatttcttttgaccagcatctttttaattctcgctactctgtggcatagtcttcaaaagtcacttaacttctagtgtctgaatttctttcttaacatatagctgtagcctttgggtttgtcatgtgatttttgcaaatgtttaagaatataggtcattccagttctcattttgagttgctatgaaattattaggaagatagactgataagaaatttagagtttataatgactctggattctacagtttgtgtgtgtgtgtgtgtgtgtgtgtgtgtgtgtgtgtgtgtatgagcgcacatgtgtttggaaaccctcaggggctgcagtgtgtctattctcttaatataatagttttggctagaaggcatttgtttccatttgtctttcaaggtactttcagacctcaggctttgtgtccaactttgccccacagtctaataatatgtaccctagaagtctaaaatcctcaccatgttccaggcacatatcacttgacatcacaggacataccacacaagtgtcctatgaatgtttgacagggcttccctgatggtcaagcaggttgtgtacctgcaaaaggaagtcaggcagagttgcagagcaggaactgaaacctggcatggaatccactcctcaagccattagagtgagaaatacctacttgctctaatgtcactcatactagccttccctttgcttcagtcttgactttctcagaacctactcatcaatagaataacgcaacattttgacttatagctagttcatcactgcttatatcacaagctcttaacagagcttgaaggaaaatctccagtgtattactactctccttacatttctgtatgtgtttattcttctatacagccaaatgtggtcacacttcgtcaatttaaatggtaattatttcagtagaatctcactcctacttgggtggaaagtccccagaaacagcatcatgtgcagctacaggaagacagagcacgagagaaagggctctgcttatggcttttagtagatttcatcaggatgtctttagtagatcttccctaagatcatcttttctacagaaaggagttctaacagagatagagctctaagtatgaagggaacacgagttaaagaaaatgtttttgctgaaattcatgtgcctgtgtttggcctctggcgtccatgtccctgccacattctgcatgtaccacttttacctgtggcccatcagggttaagagctgtaacttgaacagaaaagaaaaccaaggaagagataccttaaaagagggagacactctaggcttaactagaaacctggcactagggaaatctccaggaatccacaagggtgaccccaactaagaatctaagcaatagtggagaggctaccttaaatgcccttccccaataatgagaatgatgactaccctaaattccatcctagagccttcatccagtagctgatgaaagcagaagcagagacccacagctacacactgagctcaactccggaatccaattgtagagagggaggagtgatgagcaaagggtcaagaccatgctggggaaacccacaaaaacagttgacctgagcaagtgggagctcacagaccccagctgaggaaccagcataagaccaaaccaggccctctgaacgtgggtgtcagttggagggcttgggctgtctatggggtgtctgacagtagaaccagtatttattcctaatgcatgaatgggctttgggagcccattccccatggagggatactctctcagcctagatacacagcgggtgaggggggaggcctaggtcctgccccaaatgatgtgacagactttgatgatcccccttgggaggcctcaccctccctgaggagtggatggagggtgtgatgggtgtggtggggggaatgagagggcaggagggagagggaactgaaattgttatgtaaaataagattgtttttaatttaaatgaaaattaatttttaaaaagggggtgctgtaacttgctgtgtccacactgtgacagatgtctgggcactattgggactggctcagggtccataagatgagtaagaggcagaggagccctacaaagcttcttttcaaaatgatgccatagcccatcttttttttttttttttggcattagagagattgttattggtgcatatttctttaagacagaccagatcccaagtcacaaagaaatcctgaagattagttttttgcccgttctctgcatgacttcctaaggccactccagctagctggcaggatgtagtaacatgccagcaatcaactgcagaatccatgtgtatacatctgctgtgaaataaatagttccagactgctgttttctttcaaatctcaattcagactccttacatgtgttcacatcttgctagcccatggcatttcaaagcaattaaacttccatcacacatcccagtaatggctacaacagacttcattttatagggttacaccacaagagatgctacccccctgaacttcccgttatcctcaagagagctaaaaggaggggtatcacgattgttcacaagtgggaaattgttccttaccactcagtttccatcttgcatctgtgcatgccttcatagacctaattgaaaaaaaaaaactgtcccaagtatgttgataaaatcaactatcttttccaggtgaactgcttcacatgcagggaaaatcccttgtagaagtagctgaagaaggccatttctcagcaagagttggggaaggcatgatgggccagatgttagaaggctttccaagcctcacatatttctttttctgcgtgtgatattttaattcattttgaagaaaagagcagtttctctgcagttcactcagctatttgagtaacttagttggaagaaatagtgtgtgctcacatgcaaaatatcagcatatgtatgtgtagaagttcaggagacttaactgtagggtccacgccttcacacatgttcttttaatatccatgaaaattagtttcttctgcaaaatatgaacaacatatcctgttaataggactgttaagattttattagctggcacacagtaaaatacatatgttaaataatattcccctctcgtttagaatttcatctgtgtatatatttttcctttactttttattttatgcatatgggtgtttttccttcatgtatgtctgttcaccatgtgaatacctggtgccctcagagtccagaagaggggatcaagtactttgggactggagttactgacagtcggaagccaccatgtgggtgctggagactgaaactatgtcctctacaagagtagcaagtgtttttgaattgttgaaccacctcttcagccctcggtgttctatttttaagacgcatgtttgatgcataaaattcttcaactttcaagacagtgtgaaaactcagtccaattcgtgagtcagttttatacattgcaatgatgatttcatttgtttgtttgtttgtttgtttgtttaacctcaactcaggcaagcgcctaataatttatagaattgccaccttaagtcatatgcatctaaagaaggaatcatctaggcttgaagtgggcgaaataacacatgtacacacaaattcataaaaccttatggtttttttagagaagaatcatcagtattcagaatagcacataataaaagatattggcactgcatcctatgtttcccactctaatgccgtgtgctttgggcatgagggaaagggcagtagggaatcaggctcataccctgtgattgcaaaacctgtttaaccaggctaaccctaaggaagaggccctctgagcttcactagagacccttttagaagtacaaaccagggccaggcgttggtggcacatgcctttaatcccagcactcacaggcgtatctctgtgagttcgaggccagcctggtctacagagctagtgccaggatagcctccaaagccacagtgaaaccctgtctcgaaaaaccaaaaaaaaaagaagaagaagaataagataagaagaagaagaagaggaagaagaagaagaagaagaagaagaagaagaagaagaagaagaagaagaagaagaagaagaagaagaagaagaagaagaagacaaaaaaccagggatgccttagcgtgtgtgtgtgtgtgtgtgtgtgtgtgtgtgtgtgtgtgtgtgtgtgtgtgtgtgtgtgtgtgtcctctcaaagtgtgtgttgtcctacagtttgatacagaacttgctctaaacaactcatctttgtgagttgtctgtcagctcagtctcactcaggctctgccatttggaccctggcactctttcaaatgtcaccttactcttcatgaaggagaactacagttattctgctgccatagttctgtccttacttacacaactagaatgccccaataatctgaacaaactgcctctttgctttgattccctgctggcccatgtccattccctgatatctgaacaggctctgcagatgtcctgctgactgtatctcctgtcttcctcatgctattgctcttgccagtttgtctatctccttgctttgtgtgaagcaaagatagcttttgtcactgattactctctacctcctttaaccccgggacagttctttgaggtttctgaagggaagagtctaccctagacactctctgcctctcactcctgctctccctggctctcccttccatccccaccccctactcttcttccacttgtttctactccactgctttggtttgcttttccaactggattttgtttcccactcttattacaaggagtagtaaccttgaacctggaaacctgttgaaggaaggaaatattcctgggaaatccagtgcaagaggtgagctagctttcttccaagtgagatgacaatccaagctgtggggagaaaattcttccagtgagtgaggatccaggtgagccagaggatctatgagtggatacaataaccaaatcccagcacttttgctactgggtgaaatatcattgtgtcagatgctcagctctcacagaagaaagacatagtctgggaagctgacatgtgctcagcacatccttcttttagccacagatcacaggcccttggagtacatttttaatctcattctcatcattgtctagagacaatcatgttttcctactaacaagtaaaactatcatccagatatgccctaggctgtactgggtctcctcgaactagcaaaatagtttccctacctctggttaagaaatatttcagcaccttacagaaattacttgctaatcacagccatgttggaagcaaataaatgaaaaataatcagaaaacattataataatcttactttttatcctttgcctttagagaaatctgcaagttggacagtaaatgtatatttctatatatgcatctataataaactgtctggatgtgtacatacacacatatgcagaatgtgtagaagagaggccagaatgttttctaaactctcactatttgtctctataatgatgagaccatctgactacctacagctgctaagcaagcccatcccaaaggaaactttgaagggcagccccaacagacagccaagtgtctggaaaccttccacatgcaagctgtcagtagcactggtgatggctggcatgtttagatccggttggagttgttactagagcctgagattctatgatgaacaagaaaaaaaacaaacttgaaccatacagcagagcagaggtaccagctgctctgttgtcccgcccccactggagcctgcactttgcaccatgcagcacaagaagctgtggaaactgtacttctgctgcccttgaggggagtcggagaagggaaggagacaaagagagcaatagtgatgctagagcatctgtcccagatgctcagctgtggcaccccaacatcaggaccatgaagagcatcaatgaccacttccttactctcaaaatttacatatggtgttttcatattccactgttcatttctgcttgaaaagagcagtaattggttttgacaatgtgcacatggggcatggtagcctaagacagtgccccagccctttttagttgtaatctttgctcccttcctgacatctggcaatatctgatgaatgggtacaagaagtgctctatagcggaggcagttcttcagagaaggaggtttaggacatttaggatcaaagagcccaaaggtgctaggactacaacagctgcaggcagatctttgatctttggttcagattctaccactccacagatcaaacagcctccatccctcaagccaggtatagagataattgatctttactgtttactgtggtggctcctgaaggtaaattgattgttggtaggtggcatccaacagtcataggtggccttcatctctcctgtggtatctccccactgttccctgaggtatttccactcacaacaatccctgctgaccactcttctcctagccactgattctggtggctctggtttcattactgtgctgaagaactacctcattgattatttaactaggagattcagtcctggcatctgcatctaactaaagcctatgcatcatccaccaaagcagaagcaaatgctgtctacttggttgaccacatgactacacatttttttgcagattttttatttgaattagaaacaagattgtttaacatgacaatcacagttccctctccatcccctcctctcctgctacccccccccccaactaaagccctacctaacatatatcctttctgctccccctggagggtgaggccttccatagggtatcatcagagtctatcgtatcctttgggatagggcctaggcccacccccgtgtatgactgaacatcttagcatgaatagagaacttactacacaccaggctgtggcagcttccattacagccattgtctctttaaatgatctcttactcctttaaaatacttttatacttacagtaattatatactttgatgcttttaattgtttttcattctatcttagcattgttgcctcacctagggattgactgagaacacaaatcgttttctgtttcttttgggctctccctgttcagggtgatgtcaaatagacagtagatttccacaagccatctaagtgatgtgataacaaattagggcaattattagcttatgcaggctcagcataccttatccatgggactagaagtactttggatttgaggatattggcatatatgtaatgcagtatcatggagagaagggccaattgtaaacaggaagttagtttttgctttctagaaaccctacacctggctcaaatgcaatcatatactgcatcatagtgcccctgcattttgactgcaacttgttgcataaggtcagatttggaatttcccataaacccagtgtcgcttctacaaaacttcagattttggagctgaatttcatatttgggactttttaggccaaagacatatattttgtattgatggagtacactaaaatcaaaacttcaaataatcagatagttgagcccattggtcagtcatgttctacacgttcatgattatgctttgcataacagacacaatattggttcaggttgctaaatgatagatggtgagagatagctctgcaccactcctcttagtctgtccaagaatggtgatatattgtcaggacacagaattttaattttaaatcaagatggaagccgagcatagtggtgcacaccttgaatcctagcacttggaaagcagaagtagtcagaaaaagtgtcaggacagccagggataaacaaagacacatgtctcagaaataaataatgaataaatgaatgacagtaaagtcaagacagtcccaagcaaacctggacacttagtatcttcagagccctggtcccttcaatcttcagagccctgtctggagagagtcccatgaagtttcactggaagatgcctgctggaccttcctaatagatttcaaaagcactcatggatagatgccgctcactctatttgcactacctgccaagcacaggtaaattatcagatttcttccaggctccttagggaacgcccatgtgttggaagtttgctgtggatccttccccctcccactggataccacaaagcagtttgcacatctgacaactggcagcaaaaaggccctcagtcacttcagaaagctcaaatactttcaaaaatatgtttgcaaaaaaaaaaaaatagttgcctcttgttctcagaaacatttgtttttgctccctgcctggacttcctagctttctttgagatctggttttgtagacctctgtctaatgccattgcttaaattagccgaatctgctttcaactcccaggattacttactttcatgctcagtgattagcttccctcctcacttctggtcttgtcagaaaatggaaatacacctgccagagagtattatcaatcttcctgacttctcttgtctgtctttttgaagccagtaagcctttaaacaactttgaattaaaacacattatgcttccagaacaagacaacgccactctttgccagctaagctgcttgtgagggcctttttatgatgtctgcattgctaacttatacatacaaagacataaatgggcacagtccatagggacacatgcaagggatgcaagttagtcaacccctgcctcccccacatgctggggtggagctagcctttcctcactctactaagaaatgaattcgttttctgatatatacttaggcggttttgcttccagattgtcaaggacttttatatgcatgccttgttccctcagtaactttataattgtcttttgaatattaaccattgttgtgttggaagtggatgtttgctagctagtgtatgctcttaggcatggaagtttgtggttgggatccctaatcatatccatgctaataataccctggctacaagagttttgtttattgcacagatgagttctacttgatcttgtgaaattactttcaggcttaaattttgttcagagtttggcataaggtatatgataagtaagtatcctttagggatagaatagccctgtcacagccagatgtttgcacaacgcatttaccaacatggtaaattcataaagtgtgttcattgactcttaagtaaatttcaaaagttattgataacttcacaaaagttagaggagagggaaagaaccaaaattcttaatttccgacacagttttctaataaacatatcgtgccactggtgggtaaataacttggtgtgcctactcgattcattcatcccctaagtgtttacatgaacctaacaccctatagccagctggagaaactgcaccctgaagttctgtggctcatcaatggtaatgggcaggcgagtgcactcacaatggtagaaaaacaaaatcagtatttctcttttgaggtgattttgagtatgaaatttttacattatatatcttttttaaaaaaatcactgttgcttccaggttgttcagtgttatttcccctcctgataccacatttttaaacagtttatatgttcaatacattcactgtctaattatttccttatcagtatttaccaacaagacagataatggcctatcaagctgcatggagttgatgcatcaccaacaagaaaaaattaacagataaaaaaagtaacattatatttttcttcagctgtgtaccacatccatatacagatgcacaattctgagtatttccaaatattaaaaatctccattactgactcaacaactttcattggtctgttccagttttcatttttattgattctaatctgatgttttcttctgttgagctgtggctcctcagcctccttcctttacatctattttgagtgcttcatggatagaccatggccctagagggtaggaatggaattggaagaggaaacaaatttataaccttgataatgacttgagttcttttcctacttaactcaagagtctgcttaacaggcataaagtgttggtgatagttgatggcctaccctttttcttttttctttcgccattgtttattcttttttttttagaaacaagcttcttttacatgtcaatcccaattccctttccctcccctctcccctgccccccattccccatctcaacccctttctgcgccccagggagggtgaggccttccatgggggatcatcaaagtctgtcatatcatttggagcagggcctagaccctcccctttgtgtctaggctgagagagtatccttccatgtggaaagggctcccaaagtccattcatatactagggataaatactgatccactaccagaggccccatagattgcccagaccatcaaactgacattcacatgcagggggtctggaatagtcctatgctggtttcccagctatcagtctggggtcatgagctcccacttgttcaggtcagctgtctctgtggatggccctttttgttaaactatgttgtaatgggtgttaactggagtggatgggtgtgggatgagggccaaacaggagcaaagtaaatgttactaaactagggtccaatgctccagtttagtactgccctaggggctgaagagaacttccagagcctttgccccccccagcatcctccccttcagaccctcaacataccaatcaaatctttagtcttattactgaactgaaataaagtagtaagtttgctagtttaataccagcaggatagggggtacttgacagaggtagaagacttaacataaaaacgtaaaagttgataaaaactcagcttccccagggaaagaaaacactgtagaatatgtgtgataaaattaggcctgtcggggatggttaaagacgggagaattcacaaaagagctctgtcacttcatttccttaaccttgaccttcttttagagaccctcccccgcccaaaagaaagaaaagaaaatcttgttgatgaggctccagtaataattgcccatattaaggggaagagtatagcattttaatatgtgcatataatgagtatgaatcaaatcagggtaatttagattcttctgtctccttatcatccttatatatggagatcctgacccccccttataaaacacattataggttaatataaagtgtagttcctaactgtggactagaatactagaattaagctctcctgctagctctttgatctcccattctcccccaccctgccctcatccctcccatgcattatcccttgggatttctcttatatttgctatttctccttctccttttaataactttatataatattatgtaactgaagcaaaatattggaattggataattcataggaattaccagttacttcgtttgcttgtattctttccccagtatacttgagatattttacaatgaacttacttttttttgttttttggtttgtcgagacagggtttctctgtggctttggaggctgtcctggaacttgctcttgtcgatcaggctggtctcaaactcacagagatcctcctgcctctgcctcccaagtgctgggattaaaggtgtgtggcaccagtgcccagctcaatgatcttactttttaatgaaggaaaacattttaagaaaatgtcataaacagtaaaggttgcaaagctagaaaatcctgcatgcatccttgccatagaaaaggaaatttacctttatatatttgggatagcctgtctagctcagcacctggtaacaaaataatgtgtaggttttctcacctgagataaatactactattcaatgagtcatggctcgatccatcatactatcctcaaacaagaaaattgtggaaaaaatattttaatttgcttgctgagtattacacaagtatcaaatagcatgaatgaagctgttgctgagttctagtatagttttttttttatatatgctctaatttccaaagttcccatggaatcccgtgaaggagtatgagaccacttcctccaccaaatgttttatgatgacgctggagtacaaggacacataatgactgatgggttatcagttcagttactgatacagctttaaagcactctgccctgtgcagtgcctgtcacacagagatcccaagggatgaggggaacagaggggtcaagggatggaggatagacagagggtgagcaaaagggcacatgggttcacaatttataggactgcaaagaagaacttctgggcaatgttggttggatttcctaaatctattaactttattgatctgagaatgctttaggaagtaagtggacaagctaggtgtttgggagctcatggtagacaggtttaggtctgtgcaaaagaggaataagaagagttagaacaagggctttatataggaaaagatggtgaggctgagggaccaagctttcacccgacactggagcaaaggatcagtgaggaggttgctttcaaatttgcacagcatggtattctaaagaactatgaattttaagcaacccataggcatgggcagctgtgggatttttgcatgagatagttaatgcaataataaaaaatgttttaggcaaatcagttgtaagtttaactttgtattgactgtaaagatataagtgtggtttgatacagatggagattttaagtttttaacagggatctcaaagtattttagaaggaactgaacatgtagattttgctgcaccgtcaataaaataattctgtgtttaactgacattgtggagacagttacatcagattcaggtctagatcagctcatattctaattgaaaactaatggatttgaagacaagaaactggtataaaagtctagaagtctccaaacatcttatgcatataatgtaatgaattttatgtgctaaaagaagataataatttatgcctttgggggtatttaacctaattactagatatgtcagaaaattgatatatcttgcatgtgagttctacttatactgagaatttatgtacattatcatttttctttaaagctattagtaattttatctcataaaatcaatgctgtcatcattttaatacaaatggttatcagtagggtcttggaatccggtttggacaagtgtctctccatgccttggtttctttatccatgagtgatgacagtaatcacatgaacatcttcaaattcttgagaggactaaatataaaatatagattattgtctactatgtggtaacaagtcataaatgaccgttgtattgctagtaatattacagaatcaattaatgattttacacaccaatattttcttattgtaattatttggtttgcttttcaagccttgctggaaagatagtcatgatccccgaggttatgtctggggtctctgttgaatggcacaaggagtcactgtgggtagcatttgatctagccacagtaaagttgacctgcatcttgctttccacagtgagccatctttatggatttggactgatggatgcagaagccatggtgatggaggcagagaagtggacaaccgttcctcagcagcacgtgtgtgtggaaagcacagaccgacatatcaagtaatgcttactgcctgccagcatcctgacaatgcccaaaatgaggccagtgtaaccactattgaacatgcaaactagatgtatctttagtttctttctggtgtacttacaaagttgagatagaatgttatacccaacaattctttcaaggaaagctctgtcccagtaggctagcctatatttcctgcttgtcaatatccttgtttaatgaagcaagagttcttgagatctttatgttcttcaaccttacatttgaagttctctaaaaactgttgtaaaccagatagcaagtgctattgtacatccctcagagttgtgaggcctgtgtgagctgcacacactcagatgttgtgtttgcagtgtatacccagcagtgtgtgaagtcactgccaggtgtttgatccaaagaacagcattcatctcaggagcttttctggagttcttggttttctcctcagaaacctctctgcctggaaaactttttgaactgtatttctggttgatgatgaacatacagcgttataactctgtgcaaatgtgttagtaagcactgaaaatggggcagagttgtggtttagtttggtgtgatgtggttttaaatttttccccattcgccactttcatggcatagagtgagaaagcaaaagtaaaggggaggggaagttaatcagtgtgtatttatccagcacaaatgacagacaaaagacctttggcttccttgccacttgccttgttccctttaaatgacccagtcatttgagtaactggcaccgttgtcccttaatatccagtgagcagctgctgcctgggttgtactctcatttcaagcctctagacccactcacctgacttctgccatgtgtattgttcactcccttcctctctctcctgccaggaccatccgccccaacagtgcagtacgctccatctacaaagcctccggatgctcggataatcccaaccaccatgtcaattacctggaacacgtagtggtgcggattaccatcacacaccctcggaggggagacctggccatctacctgacctcgccctcaggaaccagatcccagcttttggccaacaggtacattgacagcctctgccggccagggtaggggccacagctctacttgctgctctttaaggtagatagaagtggctgtgctttattccatacctgggtccccttggataccattcttccttagcacctaagtagggtggaaagctgtcagggaagagtaccattctatagttgggtactaaaagggtgctgcagaaaagttgaaggccatttgttctttattctaaagaggaattgcaaagcactgagacatgtccctattaagtgtctaaggacattttacacaaatgaactttattcactataagaaagtgaaggggaaaatgacagtacgaacatctatagatgagagtaagtgggaacatagactctgagatgttgggggcagaggtgcttaatactttaacaatgaaatgaagctttgccagaacccagatgcaggtggaaggggtgtgaggattccactgcatcagatcccgaggcaccctctccatgccctccccctgctgtagacaaagggcctcagctgctgcctacaagctaattgccctacctgctttatcccaacaaacactgcatgattaatgaaggcagcaacagctgttgttaccaaagccagggcaggtctttattgcttgcttttttttctctctctctcttttctttgtcattattcatctgagtttaacttgaaaaagtatcctaatgaaactatgaagctcagagacaagcttcacctatgcatgcctcttgtgccctgagctcctccctgctttgcagaaacccagcctctctgctattgatgctggctgggaaaactcagtctcctcccctggttcctgctgcaatttgccatctagtattgacatcccgcaaaacggcttccccgaggaaacccgccagctgatgggctatggatgccatcacaggcatctggtggcctacagggtcactggcttcagggcacacatgtgtacctccacagtcggcatcggctttgatgcttgcaaagtactgagtgcaagaatactcccgaacttgcatccttgagctgcattcagaaggttcacctcagccttcccccattcaggtttgcagcagtgtcttgacccaaagcatctaaaggtgtttctctctgtggggcctggagacatgtgccgtcagaaagctgtaggaagactggagagctgcaggcaccaaggaatagaaaagatgtgatgaatcacctgcagctacccctaaactgttctgagaagctggccctttaaatgtgaaatagctgcaactggccccaagctgcccagccatggcacctctgccattcttgtactttaacaccgggaaatatccctcctagctgggcagctaaagaaagacagtttcttctgccattcttttcatctgatacaattccagggctccattttattacaggaaaaccctcgcagtatctcttagtttctgacttagtggtagggagaccttgagacctgtcagctgacccccaattcaaagcacagtcccagcttgggaagtgaagaacagggtatgcggcagggaaatggacacaccgtgccacaaaaaggagtagagaggggtgaagaaaagctctgctgtgcctccttctagttggtctccaagacaattctttgcctcaagatggataaggatttggaaagagtctgtgtacccaagattattcctaagaacagtaaataatggccatactagacattcagcctgtttttaagagtgagattcttgcctgagtgtggtggtatctgcctataacaccaactccagccagactgagactggggaattataagttcaaagccagccttggctgcatagcaagaacttgtctcaaagatgatagatagaaagatagatagatagatggatggatggatggatggatggatggatggatggatggggagaaatgaaatagataattttaaatgaagattatagttaaaaagtaggagttaaaatttttaaagcaaagtttctctagcaaggcccctagagatcacacatgatcatttggtggcagaggtttcccgccccatctatccttaacctgcctacttccttactaacctggctgccactgtggaaaactctccatggtctttttggtctccgttttttgtagccctgcctggccagggagttgttatgtagaccaggcaagccttgaactcacgtgtccacctgccagtacctcaggagtacgtcaattaaagtactttgattaacgccaccatactcagcttcccccaaggcttttgaagcagtctctccacccaggttttactcacagcccagcacataagtgaaagtacaagaagcagtttggacccaaaaggctctccccagctcattgtcctgtctcccaggctctcattgtccttgacatttcactgaggaatttcttcgctatcacttacccattacactgcagtttctggacagtctggcacctgcaaagggctcactgtacatggcacttacatctttgtgggctgtctggagcccctcagtgcctccctgtccccactgatgggcagctcctgtggtgaacagctgttgggaggagaatggtttactcaagcagctgcaggtgctaagtgctggaaggcattcagcagcattcagaactctaggccagtttgagctttgtgccccattagcccagcaagcaggcttccctggcaagccactcttggtgatttagtgggttggagctgcgggtcaccagaactgtcctggggtggacaaatgaccgtttcttaacctcttcttcctcttccatccctgcctcttggccaatatcccttgcttacccaaaagctaaactgtgacttcagagcaaatctcttactccaagacaatctggaggtcagactggagggtagggagaagctggggggtctggagtcctttgaaaactcttagatgagggcactttcaaatactgtgtacaaatactacatacaaagtttccaaaccttgtctcaccgaattcttccttcagctgtacttgctaaaattatgaacagctcctctccaaatctccccctcccatcaaactgcatttcaggcttagcttaatttgttggctgtctgttctagttttttacctcaaaatgaaagctgaagctttgcatcccttcctaaatttgattatggaaacgtatctctgcttctaattatagtctcaagtagagaaaaggtacattttatagtctgcaaagcccaataattgtgtataaaatgtagtaattatactttaatcatttttgtcactgtcctctctaaatgttcagtggaaaactgttgacattggtagacatcatggcgtataaatgtgtttgtgacttgcagtaaaaacactaccgttgcaatgatccctctgctttcactcagagcaagcctttacgttttatagaactggctttcccttgatctcactgtttgttttttaatctagagaaggaagtttcctcatgagatagatatattactatctacctcacaagagtggtgttgagtcttgaataagctaatgtgcaatacatccttagctctgggcctagcatgtaagcatttagcaagtggaaccctgcttacacagtgcttctcaatacacccagccagtggccttatcaaacacagatgcctgggccctgctcatgggctctgaatctgtggttctggggtgaggtctaagaagccccatttctaatgagctagttaagaagagatccacctacccatagatcaccctcatcttcaatttaaaagatcacccagattatcttgtttttgtgtcacaaaatatcttatatgtggtattgtccccaatgctgtgcaaataatttacaaaggcatttatattgcaaaacagactcctgcataaaaaccgtatactctataatgaagtcagtcttctgcaagatgaggcactctgtatacccatgaaagggaatgtgtttacgggttcatgaaggacttgaaaatatgcttgttgaaacttgacatttaagggggaaaattccatttagatattctaaacctctctagcacaaattccaaaacagttctttttgaaagaatttattttaactattttaaatgtgtgtgtgtgcacacacttgcgcgtatgtacaagtgcccacagaagccaaaggtgtgagatcccctgaagctggagttataagtgattgtaagcacccaacacgggtgctggcacctaactcaggtcctctgagagagcaataactgctctctcaactgccgagtcagctcttcattccccaaaacatctcttaagcacttgatatgagaaaaaaaaagaaagcaaatagtttggtttaaatacccagtatcataaatggtctgttataattgagcaggtgagagcttggagctgtcattaagctaaggtctaccctaaactgtgacaaagcacttacaaagtaaaagaggcaagaaagagagacgaaggctgatgtcgtgataaatactgtttgaatagtaggtggtgattctgaaattaagaccatttagggtcttagaaataattataaagcatggttgccagtattcataaaatgccttgttatctagctgccacaccttcttggaagcatgttgtagctgtgatatattgactagactcttcaatgaaagcagggggaaaaaaatctcatgctaattatatgagttatttcctgatgagctacacataatggcaggctattccagcaggcttcatccaaagtaattagtttgaaagccactcacaagcatagagctggggcaccgtcttaataagtgggtgtcatttgtgccagttgcacctatcatttcactgaggccacaattaggaagtcaattgtgacagaactgacttctctatagcagaagtggatctggacatggtgacaattgactctggctcttagtgtactggctctgtcttagtcacatgttatccacactgatagtgttggagtatcatctgtgtctgctgctggcgcaacacaggtatacagggtgggcatttgacttctcatttgtttcagggctggtcctcaattaggatctctttaactgagagccttggttttacacctgaatattttatgaacaaatatactccctgcaatgccaagctaatctacttgcttcattaacttttcctgctgaagaaagaaagaaagcagtttgaattacaatgttaaaagacaaaaattatcaaaatgttgaatgaaaatcagaatatgtccccatttaaactactgctgcttatgaaagctaaagaagacttactgcacatgcccagttagctgccacagaaagccttgtctgtctcttttcccatcacctctccccagaatgtcaacatgtgtctagctgcatttcatttctctacttttagagtcacatgaaattaatgaataccccaagtctgtaaagtgaagaggccagcaaattgcttaactatatatgcatagacaaagcaaatacatatctcacctttgaaacagttatttgagttttgtattacaagtatctctactaggcattaattccttgttccaaatgggatctgaaagtgatcagcagcaagggattgatttcaagaaaagagaaaggaccacaaggaagaaacacagaggctgccaatccagccagccagtaactgacccctaaacaattagaagttgactgaggttttggaagcaagtcagtggccttaaatctcctttgcaagttttgatatgaggctgtgagctaaatttcctatctaaactgttaaagaattgttttcaaggtcactcttggagggctattctgtgacaacttactactatggagccctcacatgacacagtaggttcaacagatcagagttcaagtcagggctgtgacatagaaggaaggagtcattctaactgaatttccctatcaacatacttccttcaatagcatctgagacagctcctggtccttgcctacaagttggtgccttttgataactttcaaataacccccccccttctaagagtgtcagtcaatcacatgatctgagaagttcgtggtgatgtctagttttaagccataaacttgtgaaatgagccctgtggttcagtggcttgtggaacctccactcactttgtcatccttattctactaaggggcaattactgtggggaagtgctcttgtttagaagataccagggaagaaatcaagcacaggatttgctgtaggccctgctaaggggctaccaactctctattcagagaggtaaactttataggtaccacacagatactctgacaggatgaagaaggcttcccaagcaacttaggtttaaaagaattgccagccatctggaacatagcaaaccgtctttgcacactcctaagaactaagctagtaagcggctccattgacttttgtttccttcagactttctgaaattaattattgacccggagacggttgaagagtgtggcttgatttcccttttctttcttgcaaaggcataggaatatgtgggtggtgattttactgttcattgttttcctaggaaatattgctaagtcagccacttacctccccacacagtccaaactcatgctactgaaccctgcagctgtagaaaacagccaccattttggagggaatcacaaacgtattgacaatttttgtttttccaaatcaggtttctaatgttagtctttaaggagatgagagcagtcctttgggattttctagaaatgcacattttctcccagagaagatctacatagaggccacatagccaccaatttacttgaatagccatgtgactgccaaatggcagtaactgaccggtaacctgagacagtgctagagatatgtcccctcccttttgcctctgtgatgtttcatgtattcttctaggtgctcataatttagaagtacaaaaagaaaaacctgtccatcccgactttttttaaatttcctagcatgtgttctgtcttcaccatattttcatcatcttttggacattgtctgagtaatcacatttgatctgcctatgtaaatgacatatccctctctccctctccctctccctctccctctccctctccctctccctctccctctccctctccctctcctctctctctctctctctctctctctctctctctctctctctctctctctctctctcttgattttttgagacagggtttctctacaaccctggctgtcctagaactctgtagaccagactggcctgaactgagagatccacctgcctctgcatcccaaatgctgggattaaaggtgtgtgtcaccacccggcctgacatgcttattcttaatgtattcacttatacattagctcttaacaactctttattcttaactaagattccattaaatttattgctctaggtattttgtatcctccacatgacaccacaggaaacatcactctaattatttcaagtagaaaagatatttcatctaagggaatgaaaagcataaaaattggaagtaccagaagagcaggatcccaactgggattccagatgcaattctagatcaaattaagcataaactttgctctttggggaggaggtgtttattgtttttgaggcaaggtctcactaggactcctggagctcactgaccttaaattcatagagatctacctgactcagtcttctaagtgtgagaatcttaacctatatgagaatgattctgtgagttttgacaaatctctattgctgtgtgactatacaccactgtttccaagatctctcactcctaagcatcctatcctgcttcttgcagtctctcctcccacatacccgacaactgtttcttgtaggtcttgccccttctaggacttaaatggcttaagtcatatatcacataatctttatatctggcatttttgtggcaaatgatgtttgggaaattcgtatgtcatactttgcttattgaccagtttgtgggggccacaaagcgggctcagaagttcagagcacttgtgctccaatcataaggactagaattaggatcccaacaccatgtatcaagcaagatatcccagcaatgcacagaaccccagctccaaggtagataaagacaggaagatcactgggctttctggctcccagtctagctgagaacagttcaagcccagactcaggaaggtaccctgcctcaaaaggaacaggcagagagtgatagaagacagcaccaacttctggcctccacaggtatgcatgctcacagaagcaggcacaaatacttacacagaccacaaataaataaataaataaataaataaataaataaataaataaataaataaataaatctaccagtaggtggtcaatgaaatttacgtgtttttaaagaatttttaaatttatgtgtgtgtgcctttgtataccaatttatttgtcccacgggcagacaggtgactctaaaggccaatttaggacaacggatcccctggaaaagtagttacaggcatagggtgctagaaaccttacctggatgcagcccctttacaggttttgacaattatgaacattcatgtgacattctttctgtgtcttatgttttcagttcacttggataaataactagaaatgagattgctggactgcttagatagagtactctttgcactttattagaactctaatgctgttttccagagtttgggtgccagttttgcgttcccacccccagtttaagagatgctggctgccttgtgcactcagcactttactactagtcttgtcgataagagtcttagcctagttttcctgttccctaaatagttagctggcccttccaatttgctacatggctagccccaggcctgctttatggtgaaactatgatgctgtatctggctctgaccattggtgatatccaagatgaagacaagttaatatgtgaccacggatgctgacagatacagactactggcgatgcctttggctgtcccctcagcagatttttaattaacgcacacaacatagaaaatatgttatggtttttcaggctgtttgatcattccatggaagggtttaagaactgggagttcatgaccattcactgctggggagagcgggctgctggtgactggatccttgaagtttatgatactccatctcagctgaggaactttaagactccaggtaagaaatcatttcaagtccatctgttttgcagaaggaaatggtggactatatttgagccaaagaatgttccacacttgccctactctaattgctttggctacaacaatctgacactgttactccataaagaaaaaaaggtttgtttacctcacagttctggaggttcctttagcaacctactctctccagaactaattcacctctgcaggatccactcactctgagagaccattattaatgtattgatggagctggagccccttagcttgactacctcccaataggccccacgtctgaaagctttcactccccccagttgcattgtgtgtggaagaggccttcagcacataaatgcatgagtgatgagtcctgacagcatcctggtgcagtgtcaccattctgtgtgtgattcgtttcatactcacttgggatttcatacacaccttccagtcctcaagtcctcagtaaaataggatcatttaagaacatgaaataaagaataaacatttaggtgtaaacaaaacacagatcctgcggctctacatctgccctccccccttttctgtagtttgtaaaaaagccaatcttgttcacctgcagtgctttatatttcattatagatgcattggttcaccaaaaaagagataggtttccttagctactttttgtttgtttatcaaattttaattttcaattcagacaagacagtgagcttagactgtaccaactaatctggttattaccaaaggaggaaaatgttgatattctgccctgcatgagctcaaaagcaaaggaaaataaaactctttttcatgtacaatatggaaatgaccatgttaactgggatcctttccagtcctctaagattccatagctgcacgtcggttggcctctcttatgcccgtatatgtagcttctttgtcacatagcaatgaaatgcacacagtggaagagtgccttgcccactctactagctcagtgcatagattcagaaacagagtgcatcacacaaacaaacatccatggttctaaacttatggctcatctgcaaagtcgtggactggtggctggccaaatggctcagcgggtaaaggcatttgttacctcaattgaatccccagaaccccaaaggtgaaaggaaagacctggctcccaaaagtgacctttgacctcctcacatgcccacacacattcttagttaattaattaatgaaacaaagatatcttactttaaaaagattatttgacttcaaatcacttaacaaaatgcattagaataatcttaagttttattatttttcccaggctagtaatgactgacttgtctttcaggtaggtgaagaaccatccatgaggagacacctgagatgaggctcctataatagacaaaaaaacaaattccacccaggtgtagcttgatgaaccactgagtttattagggtgacttacaggcacatgagtgagagatgacctacagcccacattatctataggagactcttctgcaatgctgtaatttcttatccatggccatggatttataactcagcaccatcttgaggacctgatttttttttagttaattttagttgacttacatttaaatagccaagtatgtctaatggctgtcatatcagacaacaccatctttaaaatcatctaaatacaaatactaaacaactgattatggaattaggtggcacaaagaattgttttctcttattaacacacaagacactatcaaaaacatcttaaaagctggggtaagaccttggtacctcgggcaacaacaccttccccagacagctagtattctctcacgtattcatggtttgcaattcattccttgattcagggatctgaagaatgtttatttactgtagggatacattaaatgtgtagcatgtgaactgggagatacttagttctacagatggtagaccttgcatcaggtacgactcctgtcaaccttgatactgttccacggtggctttttcttgttgagaaggactgactgaaagaagttaagctaatatgagattatcttgtcatgctctgtgtctgttactgtttctcaaggtaaattgaaagaatggtccttggtcctctatggcacatctgtacagccatactccccaaccaatgagtttcccaaagtagaacgcttccgctacagccgagtggaagaccccacagatgactacggtgctgaagattatgcgggtgagttggatataacctaaggaagcttaggcatgttcctagcatgtggaataacatgatgtaattgatgtagtttgatcccttcaaagatgtggtatgataggcattctattcagcatctatccatagtctggaatattttctcccccccagatacttgtgtgtacattagtttttaaatgtttatagctttggttgctaataagcctgaccatgttttctctgtggttctcaagattaaatgccacattgtttcacccattttctattcaaggagatagccattcccttctctctctgtaggaactcaggaagctactgcctttcacatggtctcgcagcttctgaaaacatagcctcagctatctctttccaaagtgacttttataatgcattgtttcactgtaaacactaataaagggtatggtttgcacttcatatataacagttttattgctgttattttcagaaatcttatcctttaatatccacaatttggcaatctcttgatgtttctccaattggctgtttccatctcgattgctttggtttggtgtgtatagagcagattgaaagtgactttattttccaaacaaaagtttatcattgactaagcaattgccccttttatcagctctgatgctttctttacaacagtatagtgagttcttatataaaggtctctgctaattcacgacttttaagtcatcacctgctctagtgtctcgattttagttctatgaagtttttttcttctttctctttcttcgcttctccccacctgtcctcctttgcttttggttgctgtggagaatgaaaagcagtgtggggatgaagggcagggcaggaactgaagcagagaccatggaggaactctccttttcaggcttgctttccttggctttctcaacttcttttcttatacaccacatgcccacctgccccagggatggcacttcccaaagtggcctgggcactcccacatcaatcaagaaaatgctgcatggcacgcccacatgccaatctgatagaagcagctcctcaactgaggttccttccctcttcccagttgactctgcttatatcaagttgacaaaacataaaataaaataaaaaccactgacttctccccgccttttctcccctattctcctgtgctggggcctggaacactctgaccacatatcctaccttcaagccctgtagtctattttaatatttgtcacacatttacttccaattttcagaaagatcattgtccctccatttttcagatgaaattttaaatgactaaagttgcagtttagttttccaattgaacttaattggaatttacatgcagtcttatgggaagacttatttttgtattagtcttccatgtaagatagaacatgccccattttactgaatcatttaacatgatataattttcttcttattgttatacttagttatttttgatcttgttgcccttgtcatggacagtatcccatactgttctactgtgtattctagtatttcggaagtctattaccccactgcatttttgtcttttatctgaacatgttgtccacttttctatttagtttatatgttttaaagtcagttttctaattgtttttaacttttatttctgaatcttgtcttgttgcattggcaaccaatcctagggacatcctgccctttcaaaatatgatacatagcatcatttgccaaagctctgcctaataggaaagtgtttataaatagaaatgtgatgtatttttaaacaagaaatgttttattcctgtagttcagggattcttctcttgctactgaggtaaatgtttttagttaattatttgatccgaatctcttaaacatgcagtaagttcttttattgtaaataggtagtgatctggagtcaataacatgcttggataattaaaatcaaatgagctaactagggctagattgtgtcagcttttgtctcatcttgttttgctttgagcttgtcatgttactgtttatattataactagaaaccattttatcttcaatgacaggagaaggggtttccaaaatcataaatggaacacaatagtaattaagctattactctttcttgtatcccaattttgaaactttgcattcagatttggtaacaagaaaattctgagcacaataacacatcctttcctcttttctgattacatttctaaaacattgatgtttgcagttgtaagagaacaaatacaattttatgtcacctttatcctgaaattcacaaagctgtactgtctctggaacaatttaggattgcaaaagaaagagcatagtatgcaaacctgcgatgcatagacctttggcatatatcacaaatcacatgtgtagagtttaaactttaaaaatcatctagtctctctctctctctctctctctctctctctctctctctctctctctctctctctgtgtgtgtgtgtgtgtgtgtgtgtgtgtgttaaaccttggtactgttttactgactctcaaagactgtgacatccacagctgccttaactcacataacacagtcacccgtcccctggtgtacagtggtagatgactgaactgtccaaagttgtactagctgtgaaatttaatttggaaatcaatttaagactcttggggaaagagaaataaacagcgttgtcaaatgactcttggaattaatcaggaatgccttcaagccctcagcattttaaagtcacttattccattccaaccacgaggacatttcaaatacatgatttgcttcctttaaacagatctgtaccagaactctggatgtttcttgatcccagatttccaagccatgtgatgctgggcaaaccattgtaactcttagaaaatccatgactagcacatctttttccacgttcttccacctgagttctagcattttatgtttgtatgattccgtaattatagaacccagttctctaatgactaaacaagaccttgggagatttagcagtaaatccctttgattaaagtaaatagaatttgagcatgtgtgattcccttcacctacattttgcatatttcaggaaattatgtcttggtatttaaaatcacaagaatttctggtgggaaggggcttgaaaatgaagagtccaaatatcttagaagttggagatcaagaagaaagaataaatgcttacctgaattacccatgccattagaatgctctgtgtcagtcacagcacagcccacccctccggtgtggtttttgtttactatgaagtgtttctcgtataataccaaaggacatctaacacaagaacttaggaacctttgtcctaggtgtggacttatttaatctagtttgtagttttgaatttatatgtcttctcttttgttgagctgccctctgacctttgttaggacacaaacttaaatctttctgtgtctgaagcgctttgtgatccaagattaagggctgttaagtttgtgccatgtggcacaatgatagttcatgatgactgtaatatttcagagatactcagtggctttagtgaccttagacaagatacaaaacctgctcttagtgttaagtaatagttttttgtcaacaatcttaacttgtcatttttcaataaatttcttatatttattgctatacatagtaactacagtcattttttcctcatttgctatagtaaacctattcatttgaatcccaaatgcccaaatgtctctcccaacacctaaaggctatcctatgtgttataaacaccaggttatacctgtcatttatattcttgattcttcagcaattgaggtttgccttcactcaagagttcagtcttgggcttatagttatagtgactattgttcctccatcttaaagaaattgtcactgcatgttgtcaaggggctaaaatgtcttattctattccaccttcaagactaaactgacttaatagcatcattttcttttttctaacttgtaatctctttttgaaaggtccctgtgatgctgaatgcagtgaggttggctgtgacgggccaggaccagaccactgcagtgactgtttacactactactacaagctgaaaaataacaccaggtgagagacacgagccatgttctcacatgttccctaaagcatgccccatgtgtcccaggcattcctgtggggccaaacacatagagtatgcatagacaactctgtattcccaggttctgctaccaaactctacacacagaaaggatgttcctgctaaggcccatgacaggcctgtcattctcaaggctgatgaaaatcatactgatttacacagtggaaaattggcatatgtattggttgcttttctcatcactgtgacatatgacctgacagaagcagtttaagaaagaaaaagattgtttttgctcacagtgtggagagatgcagtctatcctggcagagaaagcatgggagctgggtcaaaaggagttggtcacatcctgaaaaattggagcaattctggtcaattctgttgtacagatggcttttgcttttcccctcttttaaataatctgaggatcttgcctgtattcagagtgaatcttcctttgtaggttggacctccctataaatacatttcctagacacatccagtagtaattagaagtctctccgggtagacagtgaagagtaaccatcacaggtctacacctggtcaactcaatacaaaagcatggtactgttataatagcattccacctctggtcctccaagactcatagccctcttataatggaaagtacattacattcttacatctgtaagaatcccctgaatcttaacagacctaacagtactcaaaaacctagagtctttttggactttttgcatacttactaggtttcatacttccaatacatagtagcatggaacatactttctatttcaaaattgaagaactggggtatagcaaagaaagatcagaccaaagttagatcacagcccagtagagcaaacatgaaatcctacagctctatatctggtgtctgggtcccttggcaaaatctgagctccaacagtcttggctataccaacccctccacttctgccacctgctaatacaaatttcctctctcataaactgactcgattcattgcctatagctttcttttatgaacatcccatagtcctggtatctccaacatcctaggatctcccttgcgtcttaggccttattttaccagtttcacacagttcctctcaaagcctcattgcagagaatctgtccttgcctcacactgactgtccccagtggcattttgtaactttgataaaagcctatatgatattgtaatgcttgcctagaaaggccaacactgtgaatgatgctgtcaagttctgctgtgagtttgaaatatagtatcacccccatttacaacagttgtagtggcccctgctccttggcagttaaacatatgatgaaaacgcttccctaagcccattgttttcaatggggcatcattgtcaacaacattctgagttcggtagcttcctttcgagtggagcatacagtgtggtatccgtccctaatggcccttttcatgttcctccagaaaggagtttaagggttctctaaggacatagacctctcaagcaatgtacctctatccttagtgatggtttggaactcccctcctctgtttttctcacccaggcacatttttcacatcttttagctgtcactcaacgtacatctgactgagaataaacagtaactatatcccagcatagacattaggctgcctcacaatttcctctaccaaacagctgagactttttaattgagccttgctcaaatgttcagtacccagactgaatgtaatgctgccagaatgtagtgtaaatggcctctagtgcaggtcaccatagaacccttatctccctctgaaccctcaggacccagtttccgctgtctgataaattcctatgcaggtgtcccataagctcttcttggagcatttaagtgttccagtagcctgaatttccaaatgctcgaattcttccgtgtccctcttacggtcctatatactacactgtcaggtttatcacagcagataaccccactcataatattgattttctgtattagttgcttttctctggctgtgacaaaatgcctgccaaaagcaaactgaagaatggcttgttttgactcacactctgaagggatatagttcaaggtcctataggcatgatggtgagagcataggcagttagccatgttgagtcagctgtcagtactcaaatcagtataggtactcagcttccattctcctttttccctttttattcattctgggagccaagtccatggcatgatgcgacctacatttagagtgggtcttcaattcagtctctggaaactatcctcctagacatatctgcaggtgcatctcctacgtgactccaaatcgagtcaagttaatgcagaatataaggcagcaactgcaaataccgtctctcttttggaggcatgagaggtgagaccacttagcatgctggtcttttcctttagttatttcttttgtcaattagcaagtagaaattacatgtatttattgaataccacatgctattattcgttgtaggatgattaaaactaatatctgtagtttcgaaatgcttattatttttgtaatgagaacacttttttcttttttccattttttttattataatgaaattattttacatgtcaatctcaggtccctctccctcccctcctcccctgtccccctactaatgccctacctattccataccctttctgctccccagggagggtgaagacaccttatagggtgtcttcaaagtctgtcatattctttgggatagggcctaggccaacccccttgtgtctaggctcagggagtatccctccatgtgggatgggctcctaaagtccattcctatggtagcgttaagtactgatccactacaagaacctccatagatttccaagatctcctcattcacacccacattcagggagaccccctgaatgagaacctttttaattgacctttttagcaattttcaagtgtacaacatgttcttattaactctggccactatgatataagatgtatttgttgaacttagtcatcctgtctgaagttctgtgtccttttagtcctttagagtcctggacatgccagtgcccgggccagacatatactctttttatatcccctaacatgcaaccatccatgcttactcttctactttagacactgaaatagagcctgtgcctctcagcccctggtttctgcctagccatgtaaatatatcctcatggattcaagatacaaactagtgctgttcacacaaagcccatcctaccaacaccgtgtcctttccagcccagccctccttctcatcctctttcaggtaaaactgtactctaggaacagtgtccagacacttaagcagaccagccaagctcagaatcctgtttaaattcttgctagaagtttgatgccttgaggagaaaggttctcagctctcggcactagtattatctgttgcactaaccaaaatgtctggtgtgtaatttgtgctcaataaatatttaaataagtaaagccttgctatggacagttaaggaagttggcttttttaaaaaagaaaatttctgatgaacaaaattgtgtgtatgtgtgtgtatgtcagtttaagtaagaacacaccacatctagctacatgtacatacaagccacatgacaaatttcacacagaattggacagaacaccttattttaataaccttttccataaagttatggcctgtatttgttttccctcagattcagcaccacaaaatagttcttgagattcaaactccaattactattccttttctagagctagaccttaactagaagatagcagacaatgaaatgtctgcttagtggatgcagtgcagtctaatgtcatggtcctctgacttactgcatgggacgaagctctgcagatttggtctttttgatttgttgttggcatcccagttgaaaattaaccttaaggctgcaggcagccatcagcttttcaacaatgctgaggtctgagtgttgagtgaccgtttctcttgtcatcccacgatgcagaatttgtgtctccaactgccctcctggccactaccatgctgacaagaagagatgccggaagtgtgctcccaactgtgagtcctgctttggcagccacagtgatcagtgcctatcctgtaaatccggctacttcctgaatgaagaaaccagcagctgtgttattcagtgccctgatgggtcataccaggataccagtgagttgctttccagtattcgggttttttaaaagacaaggttttcatctgagtaacttcatatgtgaaatcttggctttgtttggtaccaaacagaacctagccagttcattaaagagatactttagaagtgttgtgtcgaggtgcctgtaactacctgtagcagaaccctcatgatccctcccaccacgaagatttgctagtagacttagaacactgaggatataattacagctggaatttgttaaagcaggatacagtgtcaattcagcaaagggaaataggaaaggctagaggaatctagaaccatgcactcaacccgtgtttaatacccccagcaaacttctgtgatagcatgtgtgaaatactgtatacaaggaaacttcagtagagactgtgtgtccccagtcatcattaggagctgaacaagtagacactaccttcctggcacacaccataaaccatgctgcctgtataattttcacagtgttaactaatctcatcagagtgatggaaactgtccctaaatcccagttcccaggagccagctgtgggccaacctgataaataagatgaccgtcatcagatctgctcacatctgcacattaaccaaacagacttgaaaagattccaaaacatgaagtgcagaatgcacatgtgttggaaacattttgcacattgacgaacaaattatctaacatggtaattaatgaaacaagcaaagggagaatgggttgtaagatgatcaagtactgtagtcccctgggaaagggaaaaagaaatccttttatggagctggtgagggggctcagtggttgagattgtgggtaagggaggtacagaggacctcagtgacattcacaacatcttccaaccacctgtaactccactatcaggggatgcagtaccctcttctggcccctgaggataccttcattcagtactgacacacagacagatacataatttgaaagaaagacaataaggaaacaagaaatggaggcatagaaaagaaaaaggagaagtctttttgttgagttaaagatgaaacaaagttagacatggaaatatcagtaggttgggggtggggtatttatttattacagccaaagcattatctctttttgttgttgttgtttatttcaagttttatttttttatttttttctctttttttttaattagcaagaaaattattttacatgtcaatcccaggtcactctccctcccctcctcccctgtccccccaactaaccccctacttatcccatatcctttctgctccccaggaagggtgaggccttccatagggttcttcaaagtctgtcatagtctttgggctagggcctaggccaatcccctgtgtctaggctcagggagtatccctccatgtgggattggctcctaaagtccattcctatggtagcattaagtactgatccactacaagaggccccatagatttccaaggtctccttactgacacccacattcagggggtctggacccctttgctgatcagtccttctctgcatctggatttcagttcagttcaaggtttagatgttggtgtctgcttctacttccaccagctgctggatgagggctgtgatggcatttgaattagtcatcaatctcattatcaggagagggcatttaaggtagcctctcctctgttgcttagattgttagttggtgtcatctttgtagctctccagacatttccctagtgcctgatttctctttaaacttataatgtctccctctattatattatctctctttactaagcagcaatctatacattaatgtgtaacttctcagaggttggcccttattaactgtaattaacaagtagccacaactttgcttcagtatagccctcccagagttgtaggtatctccggctttgtttctaagctctagataatttgtcacacaccatacacagtctatgatggcactgaaatgtcatgttgctgcacaacctgagaaagttgtctgtttaagattggacaagaagccttgcctcttcagaattggaattctcaggctgcaagattggtcagcaggcaaaagtgcttgccatgtgtgcaagcctgacagcctgagttcaatgcccagaattcagtgtggaagatattaggtctccaaagattgtcctctgacctataggtgtgcctgcactcacaccacacacacacacatacacacatgtgagcgtacacacacatacacgcatgcatacacatcatgcacacacagtgtaataataaagaattaattttttacagaagtgaaattctttatttaaaagtgaacatttctctaggtagatcaggccctcattccaccctacggagtagtagggactctcctaagattcttatttgcctcaaaatttggaacatgacttttaccctgataggggaaagaaaatttagaaaaagggtcataagagagccacagaagtacacagtatttctcagggaatctctttgcacatgttaagtgtgtcttccatcaatgagcactcaacaggctcctttctaaagaacctgggagtggacacttgagaaactgttcggttacatcagccaccatatagcattgattcaagtggtcactgtgtctctcccactgcctttgttacagtttctccctctagtaagcccatttacatacagcacagtgatcagataagaatgtggctactaataattactgagaacacattcacaatgatttatagttgatcttttccccttgaatgatctcattaacttgctaaaataagctgagaggtagagttcactgtaatcttcactcaagagctcagagtctagagacactgaacttgcccgctagaagagctggaggcagaatgtaaatcctaggcctgtgacttctggtacaaggccagaatttatgtccttaatgtcacagtaagggctgcagtatagcttctaaaacactgttgagggctttgcatttcttgctgaaagttgcagaacacacagtagatccatatgggaatctacctccatggaaccttgatggacatgaacacttaaaagagtagagagaggagaagcctgtggacaacattttgtttgtttctgtgtagatgggtggatagatagatagatagatagatagatagatagatagatagatagatagatggatagatgttattgttaccatctgtcataacagagcatatactcaattttcagcaaaaatttaacaaaggtaaaaggcttttgttaatatgccaagtcactatttttcatgataaagccgtagtctgtgctggggttttgggtttttttgttttattttgttttgttttgttttattttgttttattttgttttgcagtgtggacctgggtttgttattgaataagaaaatttattatgtatccattccaactagtacacttctacagaacctagatgttattagaacataatcattttttttaaccattccacagcagctatcaaatattctacagtttgagataacacatgaggcccttaccttgaaatctttagtatccattctcttttctgccagggctcaccagatggtcctaaaagctttggacatgaagatacaacaccccatgtccacagcatctccttcattgcttagcaatattgccctcactacatgagtgggatttcctgttttagagttaggaaactctgctttgaaaagagagttgaaataagtgagaactataaagttttcagctaagggtttttctatagtctgtttgctttgtgccacacaattgcctggcacctcctagtataacagttcatgccatcagctgcctgaacttttcagttcagctttccagatgacccataggcattacagggctcattagtcaacaatggaatatctccattcttttatggaatccagttgactgacatataactgtgtttcctttttttttcaaaacagagaaaaatgtttgcgggaaatgcagtgagaactgtaaggcatgcactggattccacaattgcacagagtgcaagggcgggttaaggtaagagagtgagatccagcaagagatgccaccgcccagggagctttgcaaaacagaacacatgagagtcagcgtgtaaacagatagttctcttccatctgcccttggtttgactctagcagaagcacttacctgttatttggattattgatacaattagatatgggaaaatgggttgccatcttggctaaggaaggattataaaccaaataaattccctataaagaagaagactctgtggctggagagatggctccacggttaaagagcacttgctgttcttgccacttctgactgccacaggcaccaggcacacacatagtatactacacgcatgtaggtgaaacactctaacacaaaataaataaatctacaaaaaatttaaaattatgaaagaaagatgactcagatataagtaaaaaaaaaaatggccacttgagaagcatccctgatacattttgacctgcattgtgctagtcaagaatgactgggcagatagtgccagtaagtgctatttaatcgcctgattaaattctcagtggtggaaagttatttccttatctttattatttctctccacatccccagtcatccgcttatcttaagtacctcaggttcagttccattagactatcttcagtgtgcacatagatttaactaacaccaggggatgttttcctcgaattagtggtttgctcattgccaaagctgatagtcaggagactgtaagagagcaatgtgcagcacaaatgactgaagcctctttcctgaggaagaggtcagatgcttctatgctgagccacgtggagggctctggctttgtatggaggtggagctctacaatgggttcctcgaaggtagtgacaggacattttattcattccatctttgatcaaaagtgaaatggcatagtgtaggccattcccaggcaagtgtccttgacacttgtcagtattgaaacataatttacacgtattgattacctgtgttgttgctctttgttttcataaatgttcatagttacttagtgccttgcttctcggtgcttgataatcttgataaatacaagtctgcacaactgcctggttctcttttttaatttttattttatgtgtacgcattttttcttgtgcatgcttatacaccgtgtatgtgcctggtgcccatggagatcagaaaagggtaccagatgccatgagcctgagttgtaagttgtaagttgccatgtgggtgctaggaatcaaatccagatcctctggaagagcagccagtgcttgtaacagatgagccatctctgtctccacttaattcttcttaaaggaacagtgaaatggtgtggcagaatcctcttccactgtttgttaattggggttttgagcaagtcacttaactgctgttgtcttccattgttctcattataaaatggtgacactgtgctttgccaaactatggtaaagtataaaatgaggacttttatgtacttagatctggtatgtaattagtccttgggaaataaagactgctgagcttgtttcttcttagagaacattttatggaataagttaaagcagaacacacagcagaactgtaagagccatgtatgtagttgtagatgtgccagtagctgtattaaaaggggtaaaaagctataggggaaatgattttaataaaatatttttacttagcctggtatatccaaaatattatcgttacatgtgaccaacatataagaaaactatttgtgagttactctacatccttcattgctttattaagtctttgaagtctggtatatatggtcttaacatatatctaagagttaacaataatgtttataagaaatatctgtgttaagatacttttaaatctaattgagagaacaaattttattaagccacccattctaaatgtgctgagaagtttgccagtaactgaatctagtataagcctgttttcaaatatagacatacattaattaaaactgaatgaaaatttaaaattcagttccttcacagcactagccccacttcaagggctcagtagtcaaagaaatagcacaagcctgaactagctggattatgcaagaaggaatggaggcaatcctgagcagggctggtgagcctcacgataactatgtttttggagcagctgaccactcagagttcagagttctctgtggcccaccccttccttcatcagttcctgcacagtgcagcctctgtctcctgctgaatggaagccaagctcggaacgctgtcctttcttggagagccaaggcatcttttctaaaactgtgctacatttttttttgagtggtccttattgcattccacaaaaggatttatttgatgcactctgcttttctctagaagtggaggaagagaatgaggtctttgttggcagcaggccagcaagctctgagaatggcagagacataagctctgaaaatggtagggacatacttttggtgaagctgccctttgtcatatcgaggctccttcctaggtgcttctagctgagcatgtgacttcagaagacctgtgaattttaacatggtggctaagaacaagtaggaggaaatacctttgcccaaagtccagaaagaaaataattaaaatgctaacaggagtatttttgattattttcatcagctattttatttttgtactttcccagtttcttgagtaagcagaggtcgaagtaaacttcaatttccaaaattaatatgacccatatccaaagcagccaactaggatataaattgaagtaatacagagtataagaaagtagaaaccatttgaacatgtccaatacatagaacattgtccaatagaatcaatttgataacaaagattacaccaacactctttcagtttccattccatattttatatgaaataaaataaagtctatgtatatttttaagtttaagaattaagctgtaagcttggtgtggtgatgtcatcctagaggccagaaggtcatcttcagttacatagctagcaaattcaaggccagggaggctacatgaaagcctgtctcaaaagttaattaatcagttaattaatgaattaaactgtaggctatgagaaatgccatagctgacagaaattttaaagaagaaattttttatgttttctttttatattttagaaactcagatgtgtctcagagtggtagctagaaaagtagaagtgtcaataaatggtgtaatattgtagaagtgcctccagaaaaaaaactgaaacatgatcccaccaagaaaagtaaagctgtttacaaagttggatttttgccgcttactcattagagtggcttaatttgaagctatgtatgatagcatattgccagccattgaattgttttgtcagagtttttattgtctcatttctttatggggttgagtgttttgcctgcatgtatgtatgtgcaccacatacacagaatactcacagaggccagaagaagacatcagatcctctgcaactggaggagcagaaagttgtgagcagtcacgtgggtgctgggaacccaaaatggttcttctgctagagcaagtgctcttaaccactgagccatctttctggccacttgctaacactttttaagactctgttagatactgagtatggttgaaatatgccggactacatgacagagtcaaaagaataaatgtcccttaggcttatcagcacatatgtgtgctgcaaatgttattacaagtaccaagaaaggtctagggccattttccttgtcttgcagctttactaaatctctggtctgaggggagactgtatttgttacatatggagcctgtatgtcattgccactttgtatcttatctgtgtttctcacagccttcagggatcccgttgttctgtcacctgcaacgatggacagttcttcaatggccatgattgccagccttgccaccgtttctgtgctgcctgtgccggtaccttctcctgcttctccccttatttgcctacttgtgctttttattttatttggctctagccaacttttatgtagcactcagtatgtttcaagcgagtgtagagggacacatttctcctgataattatgcagcagttctcacagaaagccagtcatcagcgccttgtcttcactgagaaactgaaatatctcagaggtgtctttttcttggaagaactggtgttcttggcaaataggtttggttaaaacacaagagtccctcagaggtccactgaaggaaaggaagaaagaggaggaagttatgacttcaaatggtggtagatgggtggctttcacagactgctatggaattctgtgcttaagtctcttctgaagctttttttttttcctgtttcttgcatgcaccttggactgaaggggctggagcagatgggtgcattaactgcacagagggttatgtcatggaagagggaagatgtgtacagagctgcagtgtgagttattatttggaccataattcagataatggatacaaatcctgtaagaggtaagtccatctgctctgaccctagacttgatatatgagttgatatatgagttctttgtaggactgccttcctacgtaatgagaaaactgagattttttttaatggtaaagtacgattcagtcatttgcctttgggcaatgacctgttacctagtatttgtaatgctgcaggaccaccttaaagtttttagtatgttcatgtttgtagtaggtgcctggaggccagaggtcagcaccaagtgtcttcctcaattgtccttttatgttttgagatgaggtcactcagtttgattagatggtcaagcacaagcccccaggatctatctcccttcccagggctccaattatagacgcacaacaccacgcctgcattttgacatgagtgctggggatctgaaccttaccaaattggccatattcccaaccccaactccccctcacacataccttagagtttttaaaataatatctctgtttccaaaacatgtttgtcccctttggcaccagtgtgtacctgccatgttttcctctaacgttctcaaacctaacagctactgtaagaaaagatttttttatcatcttcaaaagaagaattaattttaaaatgttaagagcttgctggtaactataccttctcccatgcaaatgaagaagagatttaataaattgtgctttttgcccatagatgtgataacagctgtttgacatgcaatggcccaggattcaagaactgttccagctgccccagtggatatcttttagatttaggaatgtgtcagatgggagccatctgcaaggatggtgagtacagctatgtgattctgttatcttcccactttacaaactaacgtatttccttccattttaataaagaaactaacaagcatgcatctaaccggatatgctcagtatcttgctgacattcactcaccttgaatttacaccttcaatgggtcatgttgctttgtactattttgttatcgttgtttaaagacagaatcttacggtgtagttcaggccagcctcaaactcatggtcctcttgcttcggccccttagggtcgtaagtgtgtaccaccacagtccactttgtttctctttatttttctttttttttattttctaattttgggaagaaataaatcacctgcgatcccaagatggttccagttagttgctttaattaataagctatttttcaaggtagctttcccttcattaaaaaaaagctgagcatagactggagattgcccttgcactccaagcctactcatgagcgtacaatgacacatcattatcatccaagtccatagcttacattagcagacattttggcactaaaccttcattgtgtttgaacaagcatacatgatatgtgtctaccattatcatatcacacaagatagtttcactgccctaaaaatctgtgttctgccattcatcatcctgccctacccccacttcctaggaatttctgacttttttgtgaaacatcttacatttatgatcatatactatgtagccttttctggttgattggattttgaattgtttctttccagttctttgtcatttggacctttgccagattttttgatgcctcatcatagagctttatatgctcccttgaatactaagcctttggcataaatatatcctaagtcctatgttttataaaatttggggcatagtatttaatcacataaatgttctctaacacctgccactttctggttatttggatttttatgattttgctatgtgacccctaatcaaatgataccggagtatttcatgaggtatgtaaggctaggaactaatattccaaccttccagcaggaaaacgcaagatgtgatgctggaaagtgacagaccaaccctagacctaaagattttccaagtttcgggccagtctgcttttcttgccatttaatggtttttatccaaaattctggaaacaacaccatcccctgaggttctgcttgacttatgcaggatagagtataacatgatttgcggctggtttaaggagccattttccctaccagttcattcacttctgtgtccttactagctccacctgtaaattcagcatattgcaattattccaataccagcaacagtggatttcgattctccacataattcatgctgaggggaccctaaatatcgtacctaaactttacatatagagtatatcccaacagagaagtagatcatatttgaactatcattcaacatgttctttggagactgcatttagtatagtcttggccacaaggggacagccctagggaaaggcaacctgcactgtgtttggctgaatgtggagttaggagtctgtacactgtattcagatcgccactacaggcatgcggctcctttccctgccacacagtgaagaagaagataactctgaccctgcgtgattagttcacagctcaaatctcaaaaggacagggcaggaagggagcacatgtggccactgatacacaaggacaatggtggtcttattttcatgaaacatctgggtggctgcaatcttcatcatgtttctactgaacaggtaggggagcaggataggctcagcccaccccactctgtgcttttagatcctgccagggataattctgagtgcaacattctagggtaagaagcctgaagtgggggcaccagggccatctacttattggcgttcagttgccagcatatgccttcctacctgaatttaaaaaacatggttcctttgtactggaatacaaccaggcctttctatttcaagtcagaagatttaagtgtttgacagtcacaggacatctaccttgacattttcccctctagtatttgatacaaggcacctaaagttaacgatgtactaacccttgctaagccatgctgaccacaggccaaggtcacaccaaatggcaagatggtcagaggaagtatcatggagagccatagtttgcagtgaggccgctttccaggcctattgaagaatggggtcccttgagccttcagtcacatggcaaatgctcttaaggactactgtttgctccttttcaactgtcatatttccatgattctaagacaattcttttgcagtttaacatttcagaaatcagatatatctggtcattcatgacaactcactattacatcccatcaagttgatgggatgtaagtgtcattgcctgatctgagacttagccacggggatgtgcattcaattgaatggatcgtgtggctcctggctttcatgtgtcatttaacaactgttcaaatgagcatcaaagaactacacacagagcatcatatcacatactgttaataaaaataaaattgaaattccagttgctaccataatatagtatcacagtgtaagcattgttacctttgtgatactgaaataacagtgaatattaaaccttgtgtcttagagtcaatggaatatggcacaaatgactgtatatattctgctctagatagttctaaaaagaaaagttccttgcttgtgatattattgatctctaatttattctttttccaatctctttttcctttcacaaatggataccaatcacatttactcctggactgcaatatttctccttgaaaacattgctgttgactgaaataatttggggtggaccaaattccttccctgttgactgctcctgaatgacctcttccaactccccaaatctacctctttggccaatcaaaaacctccctccgtgtgtcctgctgctctcgactccactccccctctctcttgctgacttccggaaaagccacggaagagtcctgggcagaaggaggcttctgtatgcttgtgaaaaagaacaatctgtgtcagcggaaagttctacaacaactgtgttgcaaaacatgtacattccaaggctgagcagccgccttagatccttgatcctgtagacttatagattattccatattattaaagagaaaaaaagccaaaaactgcaaaccacctctctctttcttgctatcttttttttctctctctcaagtttgtgcagggagatggtgaactattttgtcaaaacttaagtagaaaaaataaataaatctacaacaagcctaccttttaaaactggatgtttagtgttaaacatccagaatcacaaagacagtattgtattaccaaagtatttgatgccaaaatttgaagttaaagtaataatttgatttcctgccctggtttgaaggtccattttattcctttgcactcacgttcttatttcttctttaaaatgcctaaaaaaaaattctgaaagcatcacaaaagcacacatagatgaaaatgaacagaaagcttttacatcagtcatttttctgcacctaggggaaatgacaggaaactgaaccttagggtaccgagaacttcctactgaatgtgttcagtgtcctcgttagtgctatacagttccatggtgatctcccacacgtgactggttttgtatggcatgcactggttttttgcacttttctcacctgataagtttgctccattggctttatcaggtagactttctgctactggctttccaaacactgtcagttgggttcttttccacacagctggtaaaatggatggttctgtagagtcaaactgatggtagaagcatgaggtacccagaagggttgaggctaacccaggtcccctgaagcccagagagtcattctgtagaccctgtgcaacctcttggtgctacctagccatttcccccataacatttttttaactgtcgtcagaaattccatttgttatgatgggaagcattagagataggatgcagggagtttcttcccatggtcaaaagttcctaagaggtcctgtattttttaagaaatagaatttatttaaataatatttaagctcctgcatacactggtggagcagtgtttctcaatggtgctgactacgagttgtctcatcctgtcattttaagaaaataaaactggaaattgaatgtgggtagcacgattgtaccctcctggttctgtattttttcacccttcttccttcaataactgggaccatgctctcctgcacctgtccactgaatgtcaccgagctagcattgctttgtccattcgtctgattcaaaacgtattcactggttttgtgtgactcacaatcatttcgtggaatccaaaatactgaactgtagagaaattactttggatctgtggttgaaaatgatgaaacccaatatatcttttcacagttcctctgaaagtaactaataccaagctccttcctttttcccatcaaatctccatggtgacctcatttacttgtagcctgaccaggcatccttaggctctcaactctgaaaggctacacttctgagatgctgtgacttcagtgctaaaaggagagaggtgatcttgggaaggagctgggatgtggatgctaaagtccctgctcacacaaacaagtagtaaacaccctgcactgaaaaatctccctaggcagcaaagttcacttccagctacagggagataatgagtaattggtctattgaaccctttaatagcattataatgttactgaatcacatgattcattattaactaaggagctggcaggttatgctgggcaacttttcctctttagaacatggtaggctcttttgacacaaagagcaaagggaatcctggtcatggaatattattctgcttacatttaaatgagcattttttaaatgaacaaatttaaacacaaaccaggcagaggcaaaaactggatttgcctggaaaggaatccaactgattaagcatggttatactactagaggcatttggtcacaatgatacaagagataaaactgaagcttttgtccttagacagttagccactgatatggcagaaaattcactggggtcaacctccatgcattccgttcccactgaccatgcaggtgcacatcacagaaataccagtttaactactagtttgttactgtctcattaatctacatgatattattaactagaacataatgctttcaaagtttacgttaatgttatatattatgtatagatatatatatatatatatattcatgagtatatataatggatagcacaaagtatggagacgtgacaaatgctcttacccttggagacaaaagtcctattttctgttttcttttgtcttttgatccttaattcactaattaatagtgacctgttgttaagtccaaatccactttactgaaaaaatactgtacatgtgtaaaatgttcagttggttttttgtaaaatatagaacagttgtaattgataccggccaaaatcaatgttattccatattttattttttctattaaattaacctaagttcctgtttatttgatctcttcatacccatttataaacatctctgaaaggcttagttgatgaaaatttctctgcttccatattgaagtagaatgtgaaggaacagtggatacgaatgaagcatctaagtacatatagaaaaacaggagaagagaggtacaaatgaacaaggaggaagaggaaactacataaagaacaggtgacatttgggcagcaatgtatgttaaatcttgttttcagcaagaatagaactaaaactacctattaaaacttggcatagtttctgtccagttgtagctacctagtcccgagtataaagggtaaccgagtcaattctgcagtgtgtgtgtgtgtgtgtgtgtgtgtgtgtgtgtgtgtgtgtgtgtgtgtgtgtgtttgtaggggtgggggcactgatgtatcgagtatctcatataaatttggcagtggctagccctgaacacctaacagacaagcttatacaacagaaacctctgagtatacagcaccaagtgagactggaaaatgcattaaagtgatcagtggatgtatattattgtggaccctgcttgagatgcagtccctatccttgtggcttattacttaccatttgagcagagaaatcagaaaaagcagcaaggtgagttccaaccagatttaaatgtcaaagaatacatatgggtataagagagagctttacaatcacaaagtcccaatatgaagacaaagggaattgattttagtgaccacctaccatgcagtacactgtatgagaatataatacatatatcctgaggaacacataacctctcctgagtttgagaaagacagagcagaggtacatgtgttatcctatgtatccataacataaaccaaaacatacaagtagactttaaattgatatggcaaatcagcaatcacagtcatgaaatctgacgaccaacagaaagcagtgagttccaaatcttgtgggtgggtaatttagttaaatttatgctgaactggtcaaggtcaagtaagtggaactgatagaagtataataggcccattgctattactgtctaggggtcttgatcaggtttgttttctctgccagttaaagaattaaaaggcaagggagatgtcaagcaggacaggtatcagcttgagaaatctcaaacagcacacacagaacagagagaatcagcttcgtaaggaaggcttttattgggggtgaagaaagactcatgtagcaggcatgaaggaaaagaccatctgcaaagcagagggcacatttgagaagccagaggccagcttctccttgagggctggagttgttatagtccttgaagttgttaaaccccttgaatttagggttggccaatgtgaagaaatatgggatggctgaatggacttgttgagccagcccaccagcaggaggaaaaaaaaaaagaagcccacaaggcctttgtttcagctgccagacttttgtgtcaggtccagggggcagtgaaaaagcttgaggttcactatccttattacctagtcatggccccactccctatcggtttgcctatcaggaagccgatctaactcctagaccctcttcacaaataagctggccacacacgagaggatcaggtcaggaagatgtgttcatggttttaatctaattagtgcattgctacaaagggcagtagctcaacttacaatggcttagttaagaaatgactacacctttgcctttgctgccggtactccatctcttccctgccccatcgtaactacagctgcaaagttctcacgttccatcccaatggaagcccttgctccacaatggcattcccaagcttaccaggaagttgcaagccatgaagttggtagtgaagggagcccactggcttctgcctaatatactgaagtttctctgtcgagtgatcaacatcataggcacatgtgaatatggaaatacacaggccctacttgccacaccaagcccagtagaaagactctaatagtgctgacacggaactgtgcattcttcacagtgtttgggtcatcacccagccatacccagaatgccagcagacaacagggtgaaaattaagattagagacaaccttcaatttttctggtcacttggatgctacgtccttccattctctaataaaaaatggcaggcagaaaccaagaccagctgcctcacctgccctaagctgggctctggtccctaaacacagaatatgtacatgacacaggaaatataagcctgcttctcttccctggttaacatccatttccagatgcttttgttgccagcccataaaatccaaagttctccactgggcactttagagcctttgacatactcagctgggcacagccaagatgaactgaatcttactggggcttgttggcgatctttggcacctagcaggagattctaatccacataaccatgtcttcttatcatcactagagatgacaatccagccggattctgttttttggcaagaaagagtcagttatgcaccagagccagagagagagtggtggcactggaccctgtcgtctacctccaggagactgcagacaatcacgtggctgtttctcccctttaatcagttagcagtaacttctgagacagactttcacaccatagtttaagctggccttaaactcagagttccttagcttcccacgtgctgggttagtaggcatgaacctccatgcctggtcttggtagattcatactgagggattggtttaacaaaatctcttccagttgaccattgtttggatacaactgttctttagttttctgagcaacgaagatatttctagaaaattccacactttctgagatttatattgttaagatcttgaacttttgtcaatatttttatatactttaagggtgtaatgttttaatattaacatggttttatttaattggggccacacaaaagtcagcacagagatgagctttctgacacaacagtgccagcaagtagaaggtgtggcccaggctcaagccaccactttacccttgtgccccacacagcttcctttaagagtgccagagcatattaagttcatattacacatgttgcaaagtgaggaggaaccttttcccaagaaaggatggaaagtacactgaacctttgaacttggctttttttttttaacttaaacccgaataactacaaactatagatagagtctctcacacaccaagctctaagggttttatcttctccagactgaccttacaatgcagaaatttataaaaacactgagctgtaatgtgacgctatttaaaggaatataaagcatgctgagagtccagaggaacaagctccctttaacaatgaagtgtcctttgtccttgccaagggcaccccaaaacaatgtgaaacattacaaatagagttggctctcatgtgcacaaataaagctgcaaaggacaaaaccaaatgatattttaattaaatgtctgtaaattggaacatgtcaaactagtcagttgtaactccactcctaaagaatcatgtacaattaagtttaatgtaggatgaaggtgaattttaatgattgatacaatgtggaaatgccagaggttgggacgggtaggctccatggggatcttacatatcaccttgaaaaggaggtagaaattcaccatttactccaaaggccatgtctcagggaggatactgaggtaagagctgaggggataccctacaaggaaagcaacatgtaaattctgtctttgctttccacactctctccaaggagcatttagtcttattgctttaaacaccatctctactgttctactttccatttaaataagaaaatacctgaggctgtgcactttataaagacaccaggtttatttagcacaacttggggagctagtaagtccactcaatatgacatcggcttgtgaatcacatacacacacccattccccactcctgaactgcattgcatcatgactgaagttgatgacttgagtttctacaggataggaaagatcaaatggggagacaggaagacatggagaactagggccacaacaggcttgctttttcttttttcagcagtgagaactagctgaaatgagaactaaatagaatatcatgacaactatcttagtttattacaagggccatatctcatggcttcccaattagtgccacccttaaatacttcccagcacttaacatcacacactgggaaccttcctctgacattctttttttctaatctccccaaatgtcatggattcaattaaatattgggcatttcccttcagatgtctggtaggcatctcaactaacaaatccaaaagagactttagacacctcaatctcatccccatcaccaccacccctggagttctcctttctcagtacagggccattataaacccactcagttgctccggactcctcttttcaaccccaaatccaacttaccaccaaaataccactgactacttccaaaatctctctctctcttaattgtccacttctgtttattccatgagctgttgaatggattctctgccttcattctgaacctctgtcttctgttttgtccctgtttcatccacataccagaccgtcaggcaggttttgtctctcacttattcagaataaaacctgaacttccctgagatctttctgccctcacctcatgtagccttctcctttggcatggatctttctacccttgcctcatgatgtactctcctttggcctcatactctggccatgccaactgttttgtgtccttcaaacaaaaccagtgtatttatgcctcatgatgacagatcttacttaaaaaaaaaacaaaacaaaaaaaaaaaaacaaaaaaaaactcaggaagcaggtcccccatatccccatttttctcttttcattgccatgatcacatgacattcttgactgatttgcctgaaccggcacaactgcattttatatgcctagcatactttgtttaataacaatttgtggaataaatgaataagaagacatcagagaagagtgacatttgatttgagtcccaaaggataagcaaggtttttgtaattcagagaaacttagaggggtgctcaagagagcctatgaaaagctacagggccacttgaaggactgtgcagggagatggcaggcagagcaggcaggcgaaggaataagcagggaagcaggcagctggaataaagattcatggactgttgccctccctccatctccacttcaccagccatcagccctcttgagagactaattgacttgcccaaggaccccatcaagtcacctcttggcttctcaccaatgtatttgggaagcaatcattcagagagtgctgaggagggcatccttgcttcagttcccagaggcctaatggctgctttgagccaagcaaatgaaaggctaggggactcagcagaacctggtggccagatgagctcacattagagggatggcctgcagttcttcctcagcattgtatcactggctggggggagcatgacaatgtcacacattatcccataacagaaatcctatgagcccagctaacaaatctgggggaataaattctaggtgttttcaaacaggcttttgttacctcctgaatcatagtggttacaaaacaataaaagcttaactatcaaagaaagagtaaggtctgcattacatatggggatgtatttgtaattgacttaacattatgagggccagcaaaatgaccttgactatcttctgtcttgtcccacctcagaaccttggaaagacatttctcccaactctgactactcaggccctagtccacctacatcaagtgacttcatgatgggctgttaggaaacctgcttgttggccatattcaatacactatgcatgttactttgcccttctttaagctccacactagtccccacaggccttcaggaactcaacactgaacactaggccccaccctctatggaccctctcttccttctaatacagttggaaagtcttttctatagcttgaagagcctgttcaatctgaccatccctgtttcactcaccttatccctcaccaccctctcttccccttgatttttctattctgccatgaactgtagacctttgccacaaggcatttctcctatttgaatctacccctccccccgttgtcagccattctagctgatacatgttatctgggcttcagtcatttcttcatttcctaacccttataggcaaggttagatctcactgtttgccttattttttccattcttcctagcatacattaaactgtatggaaaataatggttttcacttgacatattcatgcgcatataatgttccttcatcacatccgtatgcccattctcctatcttactctttaattctgatccccaacatccttcctaacagtcccctgctcccttatgacctgtcatgaaagtccctacttcgtgtcaagtaaagttgaggtctcttgtactccacagtagtttttgatgggctaagtctcactgtgaagtatcctcagtgagtgcaaacttggtacacaaaggtcaatacactgtttcatggactaggtgcttaatatctctcccattaataggtaaacaaaaatttccatgaagggttcagtgaataattgaaaaaatgacaataaaagagtaaccatgacccagatactgggataattaaatcctgattgcgtgtgaattccagggttcacctaccttcctccacatcctcagtttcctatcctttggtgccttccctgccaacccttcagctccatgacattgtaaaggagacaggagacttgatggagtttctgtcacttgccagaaatggcatgtaacaccatcggcacaaagaagaaactaaagctttagaataaatcttactacactggaagccatcacagcagaggagtgggtactgtttagtatgctagttcattttcttgttactatgacaaaataccttatgaaagctacttaaccaaggaagggtttattttatcactcaaggaggagtggttaccatagaaccaggaaaattaggtagcatgtcacattgggtctccattcaggagttgagatgaatgcagatattagcttgctttctgcttcttatgcagtcaggtaatatagctggtgaaatggtgccactgatattcagtatgggtctttcctccatagtgagtcctttctggaagcacctcatggatacatccaaaggtatgtttccatagtgattccaaatcaagtcaagtcgacagtgaagcttaactatcaggagtaagcaaagaggcagtatcctaaacacatccccctgagatgcctgatgtattcacagctgtgaagagtccatacagaagaaatcagaggtgtaatgttcactctgatttctatgaatgaaaggaagagatgagatgaggtgaggtgagatgaggtggggtggggtggggtggggtggggtgggatgagatgatcaatagcaactggccttgaactagggagatagcgtgaacttgacatttggacccaagattgaaagagtcacagacatctggcaaaagaaagagatatggagcagaaaggaaggcaggagaattttaaggagagagaagaatgtgacagctgctgatcagaaagacgacagaagtggagacacaagccaagaaatgcagctagctctagaaacagaaaacaacctgccaccaacagtcaccaaggaaaagggtcccaccagggctctgcccataacctgaaggaacctggctccaggtcagaaagaatacaggctgccaacacactggcatcaaccttgtaaaacccagaacagagaatcagcgaggccacactgtgcccagacttccagcctacaaacatgggacaactgtgtgcttttgaaatcactacatttattctgcagtagaaaactaatgtaattatcccagatcaacttcatcagaagatggtcagtgacatcacagacagggatgaaccactaaggcaacacagcatttctgagatgtgtgcttttgaattatctgataccacaggggcacctcctggtttctatttaactttattgtattttatgtatacttgtgaggtttactggggggagggctgtggctgtgtgccatgtgtgtgtggtacctacaaagccagaagaaggcattggaactgccagagttacaggctgttgtgagatgcccagcatgggtgctgggaactgaacatggatcctctgcaagaacaacaagctcacttagcaactgagccatctttctagcttttattttgagatagggtctcatgtagtcccagttgacttctaaactcatcatgtagctaattctcttgcccccacctcccaagcactggcattatagctgtgctacaccatctgctttagtcatcaaattctttaaggatgggcactgatgaaccaggcagctgtgtaccagtcgttgtccagcaaagctaaagcaagttagtggtggtgtaatttttaaaagctgctcaagaaagaaagatgccatagacagagttcaaacagaggggatttttattaggggaaagggatcataaatgggggaaaggggagggaggagactggcctccaggacaggagcagcaggaaagtggaaagagaggcagagagagagagagagagagagagagagagagagagagagagatgcagagagagggaaagagatgggaggtgagcagggcccttttaaaagggaacatattaaacaggcataggtggtgctcttagtggcagcagctgaggacgtatcctatcagaattccaaagataggccagtacaaatgcctaaatactaagtggctcctcagatcgaagcaatgattgatggtgaacagcttcatcactgtggtctacagcctctcagcctcaccacctgggtgtgtggctgtattggtgtgctgcccttgcagtccccagcctctgaacctccacctggatgcatggtggagagttcactggccgtttgttgacgaacagtttgaggctgaacaccctgactcccagtgtgctcgtgtgaccctctgcaactaatcagcaacaagaaagtcagctcaccaatgagctgtgtctttgtgtcttttccctcgataaactgaagtccttgcagccactctcctgccctgttctcttgaatgtgctgcataactagctgtgtttgtggcagattggcagaagaagcatttacctcgcatttcctgataacctggtaaggatcagtggttgagctcactccttccatgttcactagctgccattgcagaagtgtgttcccatgtcagactggaatagccatttgtcctctagaggcctgtcatcagccagggcttcctactgggtctagctctcccactggcaatacaaacagcttacctgtttcttttccttctcccaccccattcagctcacccgataggtacccctgatgctcccactatggggaagagactaggttgaacctagcatattttgaataccatccaccctttccaagaaatgggtagacatcataatgactatcacagagaatctggaagaaggctgcctggtttcaaatgctaactttcttgcttatttgtagtgtgatcatggaaagtacacatctctgtgaatattactttatttgaataataatagtcctatggagacatcattaggatcgaataacaatgtctgtatcaggaacaatagtgatttcacttaatactacttaaactacaaatttaatattcctccttgattcctcctttctgcttatagccaggccatgacttataaccatgacaagttaatcaccttgtctctggttctctcctgagtctgttctcttccttccatccactaccacactgggtcagcaatctccatccactatcacactgggtcagctgtctccaatcctactatcacacgaggtcaccatcactagcctgagcaactgggaacaatcctttcatactcttgacaaattccgccttaatctttaaaaaaaaaaaatagtaaattaaaaagttgaaacagtgtaaaactccaacctgagctcactcctttcctgctgaaacctgtggcttctagtaataccagagcgagcaggaaatcctggagaatctaaccgtgctcctttctccccatttttccctccacccttcccatccccaccccatgaccatcctggccttcctttggtgcccatattcatcaagcctggccctgtctcccactccagaatgtaaatgtgacagcattggctttttctcacttcctatgtctcatgcataggaccattactgccataaaattttcttctcgatgggttttgaatgaatgaagatgctgtgatgcaatcgtggggtccagacaagtaagatggcacttttgtccatttgactcccgtttgagagtaagcaggatgagcattaagttatgtaacatcaaaaatggcaaattgttagccttttgtacatattgcaaaccatagtagaagcagcagaagcagctaagctagaaggaggcagggatcagtgaaagtaaatgtgtgggctcagaatatatgtaactttagatcgatcaatagctagatagatagattgatagattatatatatatatatatatatatatatagagagagagagagagagagagacagagagacagagagagagagagagagagagagagagagagagagagagagagagcgcactaggggtagccatgcatattgctaatctcaacctcagaaggctgagccagggggtattgcaagtttgaaggtttgaagccaggctggtagaatgcttgtctagtcaatgcttttcagtctctgacatgataaaagaaaagaagggagggagggaggcaaaggggaaagaaagaaagaaagaaagaaagaaagaaagaaagaaagaaagaaagaaagagagagagagagagagagagagagagagggaggggagggagggaagggagggaggaaggagagggagggaaggagagggagggagagagggaagaaggaaggaagaaaggaaggaaggaaagagtatactaaaagtctaaagggtcagacaacaactgaacagcagctaggctgagtgtagcaagcatctacctagtgttagggcagtgagggatcctgggttgttctattcctggccctacaaaaacaaagcaaaaagctgcagatgcctttttctctcctcttcccactcgataatagttatgatttctttgggtctgctttctataaaggtctattttcaattttttctcttaaaaatacacaaagcttagctactaggttagcttttcttttcctttgtccttaatcaacctactgcctcaccattccagctctgcagaagtcacagacaatgatccggagctgaagagtggagggtagcccatcgggttcccacagacacagtgagaagttgggcagggtacagaggtgagacttctcaaaccatgcaggattcctggggttggctggagcagtgtgacctatgaggtctgcaccagaaacgttggtgaatggatttgcattgaggaattcccaagcttgctacatctctgtttcataaggttatcagagtacagaggcatgaaattcaccttcaattactaattcacccctgccctaaatcgggatgatctgggcttcagatctaggcaatccagtctccctgtcttcagacagccaagaatacaaggaccttgtcttgtcctgggaattccaaatgtgctggttctccacaactgcagctgaatcaagtgattatcaacagaggtatcggtgttcccttgccatctcaggctaatgtatatacagctttaaaatataagagaatgatatattttataaatataaaaaatttaataaaataacacccatattttgctgcacctatcaaactcattccacctcaacctctctgaaactccatagagaaaccatgcaccagagctttggtggagaatctcagaatgtctttgcagtattgaccttatatccccgggaagtgagcagcctgaggctgcaccaaaggattctaagaagactggctagcacatagcaggggtgcatcagaagtactcagaaatctcatttggtcagtgttaacccaacctcaggatttctaattcagctagacactgagaatactgtttctaatgaagtcccagtcgacacggataccactggccctaacttgagaatcatctacattgctgttaaataacagacccactagttttaggcttaaagactcaggttcaagtcccagctcagccactcactgagtaatctttactcaatcactgactctagtcctccatttgtgtatggaaaggaaacaacaatgatagtatagctaagactccagtaagacacaaagcaccccctaggtgctcttccctattgtctccccagtatgcaggttactgtttctcattgtgaatgcacacttaaggggagacttattttggaccaggacttcagtacaaaaccagctggatctgtggctgtgggactgaggccatgggcatgataggagctttctgcagaggctgcccaggaagaagagagagccaggaagtagctggggcaagctgtatctttacagggtacattcccctaagttacttcttccaatgagaccctgcaccccactttaccacctcctaatagcaacctcacatcagacaccgatctaagggttcatcccttgatgaagtcagagtcctcaagacagaagcactctcccaaaagccaccagccagaagccaggcttttaatatttcagacatcaaccacaacaggaaactgtaagtgtggctctgtcagggctgccatggcaacccttgagtggtaggcagtgtagagccaatgcctctctccagaaatgtcccgcccacaggcaatgctaagcgagtatccaggtgttcacttggcctccttacaaaagcagttataacctgacatttctcctgcaggatgctgcccaggttttgtgccctgaccataagaagttactcatcccaacccacacagttcacagtggacagagcttccaagtaagaagagcacagctatctgctgattcatccacaccaactcacacttgcagctttgctgtatgagcttcctatagctgctgtaacaaatgaccacagctaggtaccttaatacaaaatgtattgtaggcagacttgtagccagcccctaagcagagggcgtggtcaggcagacctgtagccagcccctaagcaggcatggctacaggttccactacaatatatgtattctccagttctagagctcagtagttgggtctcactgggacaaagcaaagtgttcgcaggctcacctctcccatgattctgcagaggccttgccttttccagcttctagagatgcattgtttgaattcctctgctcatggtcccttccccattgtcaaagctaacaacagtgctttaaaactctctgctggtcattgtaatgccttctcctataatcaaatgtaccctatttcctctcataaggatgctggtgattacactgacccagtcaataatattaatagtaataataatattcccatctcaagatctttaatgagaccacatctacaaattacttttgccaagtaaggtaatattcatgagccatgttcaccatgctattgagagacattattagcctactaaacttggacccatcttctatcctcttagctactaccatttgtcttcaatattgaaatggaaataataatataccatcaggggaatattgtagtgtgttacccactgagtcactaaagaaatgtccactgggtttctaaatgctacactgctttacttttaaataacattaatgggtttagccctattgaatcaagaaacatccaataaacacttactatacactagaccttaaggtgtaatgcaataaggagtggagatattccctacctttctggctttaatgttctaataaagtcagataaatagggggaatgccccaaggtttgaacatatactttgaaaataaattggaagccaggcacagtggcacatgcctttaatcccagtactcaggagacagaggcaagtgaaatctctgtgagtttgagaccatcgtggtctgcaaactgagttccaggatagcccaggctgttacacagagaaaccctgtcttgaaaaaaaagaaggaaggagggaaagaaggaaggaaggaaggaaggaaggaaggaaggaaggaaggaaggaaggaaggagaaaggaatgtcctacagtgcttgatagtcagcagagtctaaggtaagagcgggctaaagtaggaggcaggaagtcagggagactcaaaacagcttggagcatccaggaagtgttaggtgtgtttgaatgccaaagccttgggtataaaatgaaagagacatcctggaggcagagaccctagattccaattataggctgtgctcctccagggaagctgccgagaagttgggagtgatcctcttgttgtcccgctcccttcagtgacctgtggactttacacaaagtcctaaaagcttcagcctcctaatggacacttacatatcagactcccagagatgtcccttcaatgtggctctgcctcctttaagagccccctgcctttcatcctcattgaaacctttatgattcacatttccatgacttgacttttagaggctcatattatagtgccctgtcagtttcctcagaatctcgattttaaatcatttgctcttaaagattttcttatgcccctagattctattttaccatttactttttgtagttcttatatgaaagcctataaaaggtaaaactgctgtgtttactattaaaatattagagagtaacaatcccagttgctagtgctataagtttatgcaacctgggtaattttgctggtagtggtggatggcaactgtaatgtgtccttggctggaactctctgcttccctaaatgcacagttcctggtctgtttcatcccttgaaacatagcatccctttctactatacttctgctagctgagagcatttgctccatggacttcaataagctggcactgaacttctgtgctggagaggtattttgcatttagaattggattcattgcaggcatgtctagaaaagtggccatgttttatgaatattttgtgcctagatagaagtactgtgttgtgaaacctgtgtccatgtagtcctctagaatcgagactatgggattgaatgctgataagttaccctgccaactactccagcataatgcacacaccatcttagtccattgtttgggtttctgaatctcattacatccttgtagtccattttttcttgttactccctccagtgatcacttattctctgatcagctttctggttcatggcaacctatagctactaatcgcactaatcaaccaaagtttgtaagaattgtgtttgttatttcattttgcttcatgttatatacccaatagtgcctggaacatattagcttagtgaatgaatgaatctctttttatggtgcttccaattgttgggtaacggtttttgttcctttcaattcctaacttcctacatgtcaacttatttatttgccaaaatattttaatcagtgggtcacatgacaagtattgatctacatcctgggaaataattcttagtcacaaagaagcgatagatgccacaagtaagatgcctgtttgcagaatcaccagtgagtgtgcagaaagaacccaagaatatagaaagcactacagagcacagaggaagtcagtgcagctgtgcgagtgtgtggtcatcaagagtcaaagaggctgccacaggggtgggagggtggaatttaagttatgaaggagtagagtttttctgggataaagagagagggagtaagaacaaaccactctaagtgagagagtgtttaaagagctaggagttccctaagtctcttggaacacagggatgcatctttaagtggcctcccagaatctgacaaggtgacaagtgcaagagctttatttaggagaggaatgaaatgccagtggtggcatgtgttaagcaagatagggaaacaagggtggccaataaaggttttgttgtcaaaccagatactactgtaaaatgatagaccacagtactgtgaaaaactcagagcaaagttcatagaaaccctacagtaggcagttttcctgtcctaaagccactctcaaataaacacactgaggtttatattaactataaaatgcttggccgatagctcaggcttattactaactaactcttacaacaatttctattaatctatgtattgccacatggtggtacctttattaacatgaaaagttcatctcctgctccctctgcatctggttggcaactccagactccacccttcctcctagtctggctctcttgcctaaccttattctgttctgctattggccagtcattgtctttattaaaccaatcacaatgatgcatttacacagtgtaaagaaatatttcacagcaccccacaattacctctctggagtgacaatgaaattgggatcttcatacacaaaatcttcacaataggttacagacatatctgggggtaaaccactccttcttctggtatgccgtgcgtacctgacagtgtttttctgaggctgaagaaagcttcagattctcattccttgagtaggtctttaaacacacatgtggtaggtctaaagacacatgtccaaggttggtacagagtacccccattctgtcatagtttgtaaggaaacctgtgggagcaacaaccagagaatgaagcaaggactagatcttgaaggctcttgtatgccataggactttattctacatggaggttacagtgatgaaaaactttaggtaggagggttgtccttatagaatttgaatttgtgattgagggctgtggctcacaactctaaccccaacactcaagaaactgaggcaggaggatttctgcaagtttgaacaggtctggattatataaggagctctaggtcaggctgaggttcagagtgagattcaaataataattggggtttgttaaagaccatctcatcttcaaagtaaagaacaacacctgaagtaggggttagggaaaatgagaaaggatggtttctctatgccagccctctgactggatgttgataccacctaccgagactgggagggatatgagcttgggaacaagttgatatgccttgtaagcatggagattgaagggccttggaaaggattcaaatggagactccagtaggcagaggatataggatcaggaaaaggggggcctgaaataaaaagaactgcacagaaactagtactgtcaggagatccttgggatagagcaagcaggaggatgggcaggaaatgaaactcccagcattcaccaaagtagtactttggcaagtctggaaatggcatggcttttccaatccctgagtcctactttaccttcatttctctttctgtcaaaaaaaaaaaaaaaaacatttttttcctgtatgcatagatgggtatgagcagggagcaagatgaattgtgaattgtataacttggattaatctgatatactcaaattatagtcttcttcctggaagaagggaacagcttgtctgaagaaactttcttaactagtttgcagagctcactcatctgcccacaaaagcaagctcaagagcaccgtgcttctaacctgctgacactcgttgagcattaggcttggctgctgattaagaagtgcccttgggaccatctttcaaaatacaaagtccaagtagctgaagtcacggtgataacagccctttgtaactatttaccttcctgcctcggcatgagtgtgacattgtctacagatgtatggcctttctgccaaacagttatgctggccaaggatgggacagcctctccatgggaatgggcaggtgatgacacttctttcatggtcttggcatccatggatgatattttatctggcaacagtgagcttagctcctgattgtttatggcgtggctttaggcagagtatgttgtgaacgcctgcactgtgttttactctatcaactcttgttaaatgtggttcagagacaaaacacagcagtccaattagaacaggtctcaaaacagccactgtgaaatcgctgcctgcagcatgtgggcctggggatagaacgatgccaggagctgcactacagcaaatcaatggtcaggtcatcccagtcagattttcctaacattcccaggctctgacaatgctacacatttcctttctgattcaaattcaaacccatgggctttgctcctctctctccactcacttcctataggcagcccattaacatttggtaacataatggtagtaataacatttattcactatgtgttttataccagacacactattctgaggacttttagttctccaacacacatagttatcataacagctttctgaggaaggactatgttgtgatttggaagccgaatatcacccaaagacccttgtgttgaagcaatggcctctattctgtcactactggaaggaagcaggctcttgcagacatggagcctggtcaaaagaagttatgtcattgtggccatgatcttaaagggtactgacactctggtcacttctcacttctttttttgttttgtttttgttctttttcctggccacagtgaggttaccaggttccactgccatgcattcccacttaggtaaactgtgccactacaggcccaaagcaattaaaaaaaaacacccaaaaatacacattttccccttataaggttttttgtttgtttgcttgtttgttttgtaccaggtatttgtggtcatagtgactgacagttgaccaatagttcattattatcccattttgtagctatggaaacaagagttacaaaaaggagttagtaaatccaaacctcacagatagaaggtagcagatatagcatatgtgtctagatttctctgtcactacacttgatcagatcttctcctttggaacagtaatgacttcacttgccactcctttacaaaggaattttgagctgtccagagaattgtcacaaagcatattattcaatcatccaaatagaccagaaaactaggcaggccatagagcaccctctaccctagtttgctgtaataaacactgtgaccaaaggaaatctgaggaggaaggggtttatttccacttatagcttacatcatgctaggaagtcaggagtggaacttaaggcaaggacctgagggcaggaactgaaacaaaagtcatagaggaattctgcttttcatggcttgctcaacccgctttctcatacaacccaaaaccacctgccaaaggttgacaccaactgtggtgggctgggctctcccacatcaattatcaataaagacaacaccctgtctgcacgacaatctaatagaggcattttcacaattgatgttctcttcccagatgaccctagcttgtgtcaaaaagaaaaacgtagccagcataccccagttgttactgaaataatcaggactcacagagtgtcactggctctcccaaagctgccctcggagctttgaatgaggaccatctgactcttcaccattttcataaataccacgctttatgcatttccctaaagctgcagtttccacatttgaaataatcaatgtacaagattacttaggatgtgtgtttaggccaatgacaaagacacttctgttagagctttccagaaagaaagtgtggctctccttcacccccttcattctgttttccttcccctttggtgctaattcagaaactaggcaggcatgaagtgaaatctggagcaaattcagccccatccttggggaaagaagcatgggggcagctggaggctgtgaccgccaaggcccactgcccagggagatcctgcagtgttgtgttctgggagctaccctgtgttcatcattctgattgcagatgttccattcactcagccaggactcatcatagccccctcctagttgctttcctaggctttgcttgcaattcacgaagtctcccttcaccagggcgagcctctgccatgtgtacctatgctagatttttgtctctttaatgcctccctttggcctgacagatatgctgatagctgacatttcattatctgtccacagcctctatcaaaactcccttttcatttcctcaaattcaggttgcagcttctgcctcatccaccccggagtcatttctctcctgtggatgcctcactcatgccagcctcaagcccttgttccccctcccctctcctcaaacactctccattttcctttttactcacttaaacatatctatcttttcaggcctatttcaatcatactaaagttcaacaaccagatagctgtcattaattcctcccagagaacacagaacaatcctgttacaaactcagtctcctgtagtgatcccaaaactaagcaagaaatcacctttttcttggggagggacacaatcaagaccagctgctctggattgcctgctcattttgacttcatgatgtcttgtgttttgggttgttgaggtgagctgattctgtgtgttcagggaagaataggcacaccccagaaaatgacctggaagcaatagttctgagtcacatgactgaggtatctaagatggcaagtttacccccaagaaagaccttagcattccccttgggagtcactggatcttcttaaaccccttatgtcacattcccttgggagatgattatgtgatgtactgtcttaggtggttctagcttttgagggtccagcccatggctttcatctgtactgagtcagcgtgatgggctgaggtagcctgctgttctctggaaacttggttccttgattcctccctgaggcagagttggtgagtcaggtcctcctcctcgccccaaatccctctggctgctgtctgacctgctttgactcctctttcctttcaagattgctctgatattcatcttaaccagattttacatggtgtgattcgcctggggcctcgaactctcctggagagctcagtcctttgctctgttcatgaccactatccaaaatgtgcagggacaggcttggggagagctgcctgtgggctgggagaacttaaatgtctttggcttatgcaactgtctagtgtaatttaggttgcaattttctaaaggcgcatttgtaaaagatcaacatttactatggaataaaaccaaccacttcctacagtagcaggcatggaagaagtacaaactggctaaaggaggagaagaagcagaaaaaagatgtggctgtgttgtttgaggattataattccaggcactgggtaaaagataaaagagacattcgtgccaatcaagcatgatcaatgttgtttacttatgaaaaatcagtagttaataaaaatttgagtccatttttctaaatggttcctgaatagttgtgttgaagacttttctaggtattttgtttatatttacccatctaaattcaacaagagcataagaagtactctctgtttctagacaaggtaatgaacagggaaatacaaatgaaacaatagtcttattttgagaagttaaagaaaaatgaaaccttcaaaaccaccagacaatagtgaagttagctgaaggaaggtggagtgcttgccagcacatgcagggccctgggcttgattcccagcaaattgaataataataataacaaatgtgggataggggtattgaagcttcagtgcctataaagaccattttacctctctaagaggccaggatgtgctcactgggaaagcaagatctaacatttacttgggcacctactagagttctacatctttcgaagcatttgtaagacagtcttgtgtaacccaggctagccctgaacccattatttagtcaaaggtgacttcaaactcctgatcctcctgcctctacctccccactgcttattggctagtaccaaagccaaagcatcatgcccgctaggccagcaccctatcaactgggtgacatggctagcccataaagcacatttggaaggacaagtaatttaactatcctgagctcttcagaaagccgctgtgattatttctatcttacaaataaattgactagggctcagagaggttccagaacatggccaactaaggtttcatagctaggcagggaagggaaaggctctacaaataggacatctccctctacatctgcatttgaaagcctccacatctggctcctagtctgagggaagtcattattctctgagagaggagaggactgctccatcagcaaagcacagtgagtgaggatgagaagaaacttgaagagaagaaatggccatcctccctatgaaggggccacacagattctagtaccagatggtagcggctctagacagccccaagctataattaaattcattctatacagaaggacaggacacaggtaggaaaagaaacagctgagactttctgagcccaggactcttccatattgctctgccctccccgtctgctcctgcatacatcccacacgggaatggacctgcacacacaccagtacctcacttccatgctcaccagtttacaggccccttctcatcaagagggaacaatatacaaccggtctttatagcttccaagaaaggaggtggatgtcatcttcccacttgaagaggctagtgagccaggcattgtggtccatattggtaacctagcatttgggaggtcaggagttcaatcaaggtcactcttgactacttagagttcagggtaaggctgggttatacgagacctaaaaaccaggatacatgcattcatacatacagaaagtggcccatgagtaatgattactctatagagggaccaagcatctcagatgatagcctcatctaatagagccgaacccctttctgaaagactttgacctcagctgcctgagaagaccacacccacagctctgtgtttttccacagcaaattttaagacaagctgatttcactctgatacagagaggctgtctccaagggcagttagcaaaataaatgataaataaaataacgtgtgtagcctgcatcttgcagctcacttgcttccaggggtcactgtcctcagtctacacagtcattcactttcactgcctcattgccacccacatatgtagccaatacattatccaattcctctcgggaatggcagaaaaagctcaatttggaagagtctgccagggtttgaagactgtctggagagttagcttctgaggattgaattgctaatttggacaaatgaagcttcgagtaaacattagccacattgctaacagaaatgtaatggtgtgacataattaaagtacctggtaatcatagcatttggccatccactgtgcaaggtgcttgaggtctgttttcccattaaatccctaccacacactataagaggttattatccacatttcacagaaaggggatgtcagggaaatatgcgtttgattaatttcagacagctggagaagaaactcaaaaatcaaccctaggtcgagtgactccaggttttcctcatttgtacagtttgatgctccctgtcctgctgacacacaacacagaacactccagttctctagttacactcaggctgttttgaaaaagcacagtgtggtcactcccaaaggaacatatggcaatctaacaaataacacattcccccagtcaccattcgggcttccaggctcttcacaaatctatcactggataagccagcagaactctgaaggtcctcagcatccatgcctgtgatgatgccgacagtgacccagttaaaggctaagctgtggactgctagagttgggccgggtcgaagtgctagccctgggcatgtgagtctgctttccccaggatttctctttcctgctcattagagagctgcctgagacttgggtgcacatgaagtcagggcagtggaggctgagggagtgttggggaggaaaggtaaaccagcacttactctgcagtgaggaagaggaagggagtcatttgaatatatttctcctcatggccccagggaatggagcagctgtcctagcttaccatcacatgatgacagcaggttgaaaggttctttaaattgctatggaaatcattgttttagaacttgaaccatagcagggaacacattgttcttagtctactctgtaggaaggacttgaggctttaaccatctgtatgtaccctggctctcttgacgacatcacaagtgtttggtaggctccatggactgtgctcctaatagtgtcacctaccatcatcaccccaaagaggaaggaaatgaggtgccccttgggcctgatagcaggtgctcccctgaggttacacatagcaatattcagtaggatgccttccctcttgccagttggcatcttcaaaaagacaagattccttggtctcagattttgctagtcattcacttcctcagtgcctcctaaatcctcattggcctgtgtcctacaactgtagaggctttccagaaggttaaaaaaaattagttgatggaattatagccacttacttctgttactgtgtatcgaatcccagccagcccctctgcatatgcatcagatactgccccttcccctcgccaagaccaggcctttacaagcacaaacagaacacaatgtggagggtaaaaatcctcaggagtctatagaatgactatactgttagagcctgtgaagattctagtatcacttacaggaatggaaagatggtcccactcaatagagtcacgaaattttacatgcctgtcctaaacggcacccacaggctcaaatgtttgagcactcagcctctagctggtgtgctgtcaaagtaggctaaagaaccttttggagtgagagctaatggggaagaaggtcactgaggtaggtaccttgtcctcattgcttctttactctgctttctggtctgacaatatatgagaagctgttttctcatgttcccaacactaggatgaactgtactctctgaaacccaagccatagcaactccctgctctaaaaaaagaaactgcacacagaaaatggatgaaggacagacagccaccacattgtcctcatccacaggacatgctagggtctgcaagttcagtgtttaattgcaggtaataatcacactcatgcctttttctccacttgggtctgatttcacttcactgccttctctctgccacatccttaattgacagaatttgtacacattagcagggtacaaggtaaaggggttgacaagatggttcactgagtaaaggcactcggcaccaaacctgaaaacctgagttcaatccccaaaacctacatggtaggaggaaagaacccattgtctcaaatctaacacacacacacacacacacacacacacacacacacacacacacacacacacacacacacaaatttaataaataaataaaatgtttgcatctcattaaaaacagtatactttgtagaatgggctaggttgagctgattaacataaatacggcctcctatacttgttttctggtgagaacacttaggaagtactctctggggttttcaaatatccagtacatcgttgttaactatagtcctcacgccacacaataaagttcacaaattcactcctctgactaattgatcagcatctccccagtcttctcctccttaggtccctaacaaaccacactccactttctgcctctgaattccagttttgtagggtgtacgttaagggcgatggtgcatattttccctgtctgtgcctgtttaattctagcatcttcacctgaggacttatgaactctcaccaacacaaaagcaacattaaatgggctttaccagttaagaaaatggtaaacaagaacctgtacatgtcatagttgttgttttttttaacaagggatcagagagatggtattctggttgtaagctatttatttctcaagcaccaaatttatgttgttttcagacagcatttaagcagcacccaaactcctgtccatcctgggaatgtatgtcagtgtactgtggtgcttgccaggtagtaggagcacctgagtgtaatctccagcactacaaaatggagagagaacagagaacagagcagagcagagcagaggagagagagagagagagagagagagagagagagagagagagaaatagagagagagagagagagagagagagagaattccttatctagggatctgataaattggctttactaattaaaagtgttactttgaatttccttgaagggcttagtgcctagtaggtgaaacaaactgcttaagaggctcagttggtttgattcataaaatagccttttaatacagtgggccattttatccgagaaaacattttttaaaaagccagtaggtgcaacatgcctgttctctttccattcattttcacggttgcctccctttgatactgctgttacctcaccaagtggtttaagaaaggcatgttctcttttctttttataaacagaaaaactactcagaacactgaaagggcaattgaatccatcaaagaggcatgttataaaaagggcatgggctaggctctgagctcctgaggcacagcccaactgtcacttacctacttgaattaacttatgcaaaatgttccatccctctgagcctcagtttctcactcacaaaagaggtttctgtctggactggacattacatagtgcaacacttgtaacatggaaggcatcaatgaatagaagcttgtatgcttgcagcatccccctatgttcaggtgtgttggccaacacttcactgtgggtaccttctctgagagtgttactgtggtcagggctccaacaagggtggaagtagaagggtcacctcttcattacaccctttgaagagcatgaaagttgaagggagctaaatatttgcatgtgtattggatctaaaatttatgatccatccagtttgcaggagtgccaaccctgagggtgccagaatagcataccatgggcctgcacacaggtccatgcctagcctgagaatgagagatccataggaccctgaagcacaggcacatcaacccaagaatcccatgggaagggaggtgtgccaaagggagtgctgagagaataggttacaggagcagtgtgacccaacccttgctgagacagacccagggtaaggatgtgggtggactcttctggctgcccttttgttcattctgcctatagtgggtcctaaggatcacctctgccagatggctcacttctgatggatttgtctgtatatccatttcctaccatgtcacctctctcaagcctctacccgacagataggcaccctaagatgatcagtgctttttatccattccccaaggcctgaagtggtttttgttgttaatatcagtattgatctattaaggatcaaacttatcggatagatttcttaattgttgtaaaatatatatataacataaaaatttccattttggccattttcagagttcagttgaatagctgcaagtgtgttcattctcattgttgtgtggccatcaccaccatccatctctagaacactttcatcttttctaattgacactgtgaagccatggaattataattccccatcactcacccccaccatccctggaaatcatcattcttgttctcatgacttttgttaccctggggggcctcataaaacaattgtccttttgtgattggcctgtttcacttgatataatagcttcaaagttcatctctgttgtagaccttgtccaaatctccttcccctttaaggctgagtgactgtggagactttaaactaaaggtgttgcaggctcagttgatggtctcatatatcgagtcctgctataaaacatcagcttaacgaggctttaaaaactgacttatttcattagcatataattagttgagagtattgccaagcatttattgtagctggcataaaacaatgaatgcatagttcttcttcatgaaaattgtcttcacacaatggtattttaagttggaagctatgtattggcttccttgcaaagagatagtgtatataattagtactggggactgtggaattgttcaataaagtcacgtgattcctggaacctggatgataaggtccataagtaggccttaggtcgaaagctgcagataatcaatgtccaggttgttcaatgaagcaacagcaacactgaacagctggattccctgtacctattcctctccattgactagccacttggataagaagtgtttgaaactctcttcacaatctatcactcaagtattagactttgttagagtcaataaagacatagtgtttctataaaataaggatcttgagatgggcatgatggcacatgtctaaaatcccaaatataggagatcaaagttagaggatcaggagttcaagatcacactctgctacacagcaagcttaaggccagcctgaactacatgagactcttccccccacacaaaagagagaagatgaagtaaggaaggaaggggaaagaaagaaaggaaagaaggaaggaaggagggcaggaaggaaggaaggaaggaaggaaggaaggaaggaaggaaggaaggaagaaagaccaacagaaagagaaaaacggtagctcaccatctggccatgtgtacctaaagtctattattatatcttggattgtgttttataactggggataatataatgtatattcaccttttctggatgacctcatatgagtttctctatagtccaagtttattaataacatttgacaatgttatcaaggatggagtgagcatagtgagtcacttgcttgtacacttctaaatttataagcattcatttttaagcttcaaatttcaaggcatcattcctccccatgtgacccccacttcctcagtgacctttaaaccccataaaacaggatgagaatggaataggggaacagaaactttctagtcacaggaaaaatatggtctggacataatacaaatagatgaaatgccagaaagaagagcttgtaggtgaacaacgtgctggctcctgacatctgctaaaagtgacttcttctaagaattttgtgtatcacgcctgtcataaacattcaacttcattgtgcaatggagacagatgacaagaatttgctgttccaccaaaggaaaacaagagcaacttccttatgtccttggaatccgacttcctcagttccaaatgtgcagagaaaaacttgtgtctgtatgcaaggactgagggcagttgtttatgtgactaattggacatctacataaatatgggaattggggcagtccctctattgtcatctgctgtaaaaaacaagtgcttattctaaagtgaagaggagagcagactggaggggaatgaaccatttagctgtcctttgatgactttcttacataagcttcaaggtcacaaaatgttctccattttgtttccaagtaacaagaggaaaataaacaaccttgaggagtcacttataaggaagggaaggggcttgggaaggttttagattgggggagaatctttgtggatgttgtaagatggaggcataaagaggagattgaagacagagggattagctagaaatattccagggaaggaagatgaagagcattgaatggagatactgtgggcaggaggaaagatacacctccctcaaacacaggtggtaagaggacagtcaaggagctcacaaaggatttaggcactgagaaaaagggagccgagagaactcagatatcttaccatcaagtcagaagatgtctccttctgagcaagtgttagtagaacatgagtttggagaaaccttggcccatcgcaagtggagaatgaaagggagtgaagttgtgttaaagcttgtgcttatcagtagttctcaacctggggattgagacccctttgaggatcaaactacccttttcataggggttgcctaagaccatcagaaaacactaatatttatatatgtttcataatagaaaattatagctatgaagtagcaacaaaaataattttatggctggggatcaccacaatgtgagggactgtattaaaaggtctccacattaggaagtttgaaaaccaccaccttagatcaagtttacaaaattctagagctaggcaatgctcagtggtcattagatctatgatgttattttgtgagtgctgaattgaggccattacagatcagcagatcaatacatagccgaggtactgatgaaaatgagggagaatttaccatttcccacatggacatgatgctcactcttctaagcctgatactcaggaagctgcggcaagaggatcacagggcagcttagccttgttatgtagaacaagatccaggatagcctgatatatggtgagacaatgtctacaaataagcagcaacaatgacaaagaatacacaaaataagtcagtgaacaaacatttcaaaggaacatcctaataacccttgcttgatctagtgatgcatcatctgtagttaggaagactttgggtgtgcaactggcacaaacctcacagctaccaagcagcttttgacccagcagagcaaggtgttaataggtaaaattcttaccctagcattggatttgctttcttgaatgtctaacgtgtagcctgcaagctgtgtgtggcccaggatagcgtgaatttggctcagcatacatttagatgacaacattatttcatactgacaaaagggcaggacacctctgctatgtcacagaggttaaagtggatgaagatggagaatcagaagaaccgaccacaatgtcagtttctgtagggagcagcatggtagcaaagcacctgtctatgtctaggtctgcaacagtctatcagagttctctgtgtattcttctcttctgacatagacttaggacagtctaaggaagtatatggcccctgcatagcatttgattggcaactattccctcaacatgctcattcttggaggatgactcagtcagtaaggtgcgtgctacacaaagactacacaaaatgctatgtgaagatgtgagttcaatttacagcacccacataaagaaccacatgcaccaagtacattttacaaattccagtgctgggggaggcagtagtaggaatatgcctggaattcattggccagccaatctagcttattccaaactcccaatttagagagagacgttgcatcaaaaaaaaaaaaaaagaatcaagatggtgagcaactgagaaagacacttgacattgacttctgaccttcacattcgagaacacacacacacagagagagagagagaaagagaggggggagggaaggaggactctcaaaatttttgaaaatacaagagcagggccttttaaatttatgtatttctaaatctcagccaaatgcttagcatgtatgtagatgtttcaaacataccccagaagtaggtggatggagaatctgtgttctgagttcacacttctatagaatatactttctgtgggattttgaaatctctgtgactttctctcattcctattttattcagaatatatcttttgaaaaatacaagtgtgttacctatctacaagcacaaattatttgcactggcccctgtaggtaagctctgcttcttcatacatagtctgctgtgaatccctactcttcattatgttggtccccagactatgttacaggcaccaaatggtagagccttctacaacagtagtgaaaaacgatactatagcaagggcaataaacaaaaaatgaaatgggagatcctgagccaataggacactggtattaggtgagatagacttggcaccaaccctacttggcagaagtctgagcttttttctgctttgagacagctggttgattagcaggcaactagtctatttgtgatggttaatgttaactgtcaagttaacaagttctgcagtcacctaggagacaacactccagacacacctgatttagcctactgatgtacccatgaaggatcatgttgactaggttaattgaattgggaaagcccacactaaaagtgagtggcgtcaacccaaacataagcatccatcgctctctgcttcttgattgtgaatatgaggtgatgaggtgcttcaggcttctactacgatttctctgccatgatagactgcaccctgaactgtaagcagattaataaatcctttctctctaaagttgcttttgccaggcatcttattacagcaataacaaaaggagaagaaactaagacatctttcaacacctttatgtgacttagtaaagtgtccccaagacagggaacgcagacagcaccagagagcatgacatgaaatacatgagaactgcacttcagtggccacttggccattttccaatcaaatagcatggatgatcaccaatacacatattttcattccttttccctagtggatagtcaatttttgtgagcacaggtctctcttcccaagcaaagaatcacaacttcatcataaagttatcttctaaggttgtagcaggcattcctttgggctaccaatcagctcccaaatcatgacacagagacttattagttatgaattctcagtcttatcttatgctagtcccacttgctcttataacttaaattaatctgtttctcttcatctaaaatttgcctcagggctttttacctttctttcattctgtatatcatactgtatatctggctgactggttggctgaccccagcatctccctttctttctctctctttctctactctctccttctcccctgagcctagattcctcttcccacttattctctctgcctgccagccctgcctatccctctactgctaaactattggctgttcagctttttattagaccaatcaggtgccttaggaaggcaaagcatcacatctttacattgttaaataaatgcagcataaatgaatgtaatacacatttatataggcaaagtaatattccaaaacacacttaacagaaggtaagctgctcagagatgtttgcctcactctgaacatacctgtttccccatctcttagccaacttaatagactttatgtgaaatagactttacatgaaagacattttctattatggaagagcaaactctgccagtttttcatttctttcagtgtggtttagttctaacaggtgaatgagtccttatggaaggcttgtcttccctaactgtagttcagaaaagctgtggggaaggcaatggatggcttgccccatcttcatctatctatttctattctcataatctatttccatagcttttctgaatgcaactacagtaaagccagcagtaatctcagaggatcaacgaggtgggttgactaagccataagtatatcatcatacctcatcacttgcagtagctggcaaattgacaagctacagatgattaaacagctgtcacatttgggagtggtctgaggccatgggaaggagatgagtctgccagaatctgacaacattttattcggaggattatctgttcacaaacaatgaaaacaaaatatggtctttgggatatgggtgaagaaacctctccaattgttgtgttttgtagttgttgttgttgtttggtttgctctttttgttgttttacaatgacaagggagaaagaatgtggtgtaggaggaggttgaattcactgaatgccatcttgtctatgatgccttcagtgaagttcacctctctctacccttttgctgcagtggtgattttctatgtgcaagagaaatttgtgaaactacagtaagttccttgacagcatcagatgtgtgctcctatgggaaagataaacctgccagctgaaggaaaacaccctctgtctcttcactgataatcttccaggacaacatctgccaagttgcagccaaaattcttgtctccaaaactacaatccttcctgtatagcatggttagacaagatgtgggtgtgtcctggccactgcttgacttgaactgtgaccatcacttgtgttatttccactgctcaagtagccatcaagagctctggctgctccctgcctgccagcctagacaggcttgccatgtggaatacagtaagcagctagattttgttccacaggagaatatattgatgagcaaggccactgccatatctgtgaagcctcatgtgccagttgctggggaccaactcaagaagactgtaccagctgccccataacaaggtgagtaaccttttagtatttcctgggaatagggtgtagagaggaagtgttaaccattttagtggcacctaaaaagcctgctggactcagggcccaaactgtctcccatgatccagacattccctaggatctggtctcaacccacttctgtagcatcctctccaacaaggtccaatacccttggcaaaaaccaatttcctaaatgctggaagagctatcttgctaatgaaaatggtacctctgatgtcacttttgaccagtgaaatcccgtatcctacacactcatctctcaaacagcatttctatcttctgataaatatatatatatatatatatactcatttatatataaatactcatatataaatacatatatactcatttctataatctattcaagggcaaactattgtgtaaaagcatgtctgaccacttttcagtaaaattagccttccctctttaaaaaattactattattcatttattatttatttatgtatgctctatatccacatgatgtaaacgtgtgttatagcacttgtgtgaatatcatagaacaagttatggaactcagttctctccctctaacatgtgggccccagagatccaccccagaccctcttagcctcatcctttatgaccttctgctctatagatacatctatcaaagcatgtgtggcctttggagacatctgtttacaaaatgcatgttttcatagactgtgagtttcttgggatctcacatttgtgtctcctaccctggcaccatgcaagaaaaactgggggcatccatacacatcaaatggaaatagcaagcaatggaatgagcaacactgctaatctgatggacatctccaatagagataactgaatgcctgatatctgtttattcaatgctcctctgattgtagcacttaatatgtgggagcttctgtgtgtttagatgaatgccctcatccctgctcagctaaatgccaaagaagaagctgcctttctctaataaagttgtttgtagatgctgtcacagcaggggtgccttgcagccatactgagatgctccctctgcatcctcattctgtcctcaggactgtgccattccagtgagcaggagctgtgctgtattctccacagtgatcagtgtatagtaaccattctatgaccatttgtttgtttagttgtgcacaatcaaagccatggatttgactgtcagaagagctccctcagaaggagggagcaaataataagggacaaagaccagaaggaaggatggagggagagaaggaaggacgaagggaggcagagaatggagggaaatagaaacctcaaggattcccagtgttaaccatgagaatgttttcttttgcaaattaagaaaatatattatgttccactgatgttttataatatattgtccaatatcaagtctcattaattatccaaatatccttcacagaatatttttccagaatctagttctcatgttttatttttttaatttttaacgtttgctttgccttatttgtttgtttgtttggtctttcccaactgtaatagttttaagggttgaatagacctgttgttttcaagttttaatacttttttaatttctctttttaaattatgttttcttttaaaaaataattcttggagaatttcatactatgtggtttaattatattgactccctccacaaactcctcccagacccacccctcaactttgtaggaaaaaaaacacatcttttttattttaaccaatcaagtccaatttctactacccatatatctttgatgtgtgaccttctgttggagtgtggccaacttgccaggggcaacattcttaaagacaacttacttcctcttccagcagttgtcagttgccaatagctcctcagctagaggtgggacttcctgttgacctccatgctgagatttttgtcttatttaagtgtgtgttgggggctttgtgcatgctgtccaaatcacttttagtttatatgtgtcctgtatatgaaggacactgtttccttgtgtttgttcactacccctggctctttagagactttatgcccctcttctgcaatgatcccttaactgtaggaggaggaattatgatacagatgccctgtgtgggactgagcattctgcagtctcttattctctgtattttggctagttgtagctttctgtgttattcatcatctactgcatatagacgcttctctgatgagagttaagagatgaattaatttatgggtatatgataattcattaggaattggcttaatacaatgtccttttagcagactattagtgcttgattctttcctagtgcttatgacctgataatagtgccagggataatagtgccgtgttgttgtgctggacctaaatccagcacaagtgattggttactttcatgatattcatgccactattgcaccagttggcatgtcttgtcagaccagatgttgctatagctcaaaggatgacagctgggtaaatcccataaattactgttctcctttggtaatgtgcatagcacctcccagcactatgaatgctagccataaaggtgaaatatccaattgagtaccaactaaacttctccgtgttttatatttaagaatgtggtttccttggcaatagggtcttaatattgagttcttcagtgtacccaataaccctgataatagactgtactgtttaggggtctatgagaactcagtggccaacaactccaaaagtgttaacctattcctatcactggatcttttatttgttatcctgtggtatctagtaagagtgttgtaatctgttatagggtaactccattttaacacttttcctacaggtgtatatttacctacacctgtacctataccagcctatacttaaacctataccaatatagtaggaagcctccacacccatgaatgggtttccttatgacttcttcaaaggtcattagtgttatttattgccattcccatattctttcctctatcctgtcctcccatcccccactcagatttaatcccctatgttctattaactctctctgaacctaaataccattcatttctatctccccacccacgagcctcccaccatggcctcttactaatttccaaaccttaaaggatattccaaatgaagcaaacatatctgcaaagtcaaagctaatatccacaaatgagagaaaacacatgatgtttgtcttctgagtctgggttacttcattcagaaggataatttccggttccatccacagtacaatttcattttgcctcagtcagaatggctaaccacaaaagaataaatgatgacaaatgctggcaagaatgtgaggaaagaatactttttcactgctggtgagactggagcagtcactatgaaaatcagtgtgggtgttcttcaaaatgctagaactaggtctatcacatggtccagctctaccccactcagacgtaggaaaaaagtaacagtaggttccccaaatgcactataacatcattgaccttgggttcttggccaggtttacagtaccaggtattggattgaagcaggccttcaatccaatcagaaagcagctaattacccctagaacgttcttaccactattgcaccaacaggccagtcattattatagctggcaggcttcacagatgggtggactgttgctgattcttttctatgagcagccacaagactattttctaagtgtttctaagagctaaaactctaaatactgaatttgctttaaaaaaaatttgaagcatactttaagataaagacataccaaaacaaagtcctgtttctccttctaaccccccttgtactactatgaataattatattgccttacatgtttgaacgtcttttaacacttgtctaatgaggcaattacaatcattcaatgtatgctggagaaaccatgattgtccctagcacaatagaagtggaaaagtaaggagaaaaattctatcactgtaaatagctaccaaaaaaatatatctaggtacaggcccaaccatgacagtgaaggcaaggcagaaggagcttgggtttgaagtccatcctggtatatgatgagaccctgcctcagaaaaagaaacaaaaagaaatccaggcccattagtacaaaatggtaggtagcactagtgggacattttggtggttttgtttgtgacgtatactgagtattagcttttgaataaaaaaaagcatacacatgtatcttgaaccagggtatcttcctaagaaaatattgttcccaggaacaatttcttctcatccctctgagcactagctcctcgcccaaatctttcttctttgatgctagctgtacacacacatgtccaagaaagggtaatgtagcatagcaatgaactgcttgacttcttatttttctggtattttccctgaagggagttgaaaggataaaaagggagaaattatctggaaagaaggtgatgttgacttatttgttcttgagaaaatggcaaagtattttcctaaagtgttttccagagtgttgcctggatccgtgtcttggctcatttggagcggcaataacacaatacttgagactggataaattataaacaatgtaactttggctgaatgttattggggactgggagctctatgtccatggcaccagcctctggtgaaggccttggtgctgggtcacccgttgaagaagatggaaggcaagagagggtgacagtaagaggacaaagggaagacagacctgcttttatagctaacgtattcccatgatcacatcatcaagccatctattgtataaaattcctcactgcctagtccactcatattaaaccctacttcacaacccactacttgttgccttgtgggtcaagtttccaaaacatatattttgtaaagcacatccaagcaatagtaagtggagtcaggtgcattcaaagcaggctaaaagcacttgctttatatttagctctgagatagatacagagtccaatagctctctgccattgaggtcacagtcaagggatgctgacacactcaaagcaagcaatagtggggggggaagttcaataatcccagatttaaagcaagagctggaccagcaaaaaggtagacatttgccagatgctggagcaacagaagatacagactctgcccagccatgggaggaagaagtcggcttgggtagaagagcccagtgtctcttatcccaaacttagatttcctgatgatatttcctcttgtttaaaattactggaggccagtgggggattctaccttgaagatgaggataattgatgaccctgagatagaatttttagtgtgcttgcttccagaacaaaacaggacagaaaacagtgatgatggatctggactgaggttccaaaagggagacaaataacctggagagctggtctctgaagtttttccggttcttaagctgttggatgccttttagttcctaaaaaacaaagttggtcttcagaaaacttccacctgtgacaagaatgttaacattaactttcgggtttgattcaaagccgaatgaataaatcagtgattgtgagattagccagatgctattgactatcgaaactgagtggtacatacattgggtaggggacaattatcagttacatgtgcaatatatatttctatatctgtttaaatttttctttagtttttaatctaaaaatttaactctgaagttgctttactaaataccagcaaataaataaataattaaataaataaataaataaataaaatagagatagagtcccattctgtaggttaggttgacctgaaactcactgggtaggccatgtctgccttaaactcatagcaatcctcctgcctcaacttctccaatgctaagattagaagtgtgatccactagccctagtgaaaaccagaaatttagaaattgctttcacatcctatcatttctctttgcatttctataaatctttagtttggctctttaaagacaacttgtcagatgaaacaagagcctcttatctctgtatgtaaaagacacaactctgagatgttggtcctcttgtcctaggctcactccctaccccagtcttgaaggagtatagggtaaataaaagcatctggaagttacctctgctcttacactgccttaaacatgctactcgatgtattttaatgaaatagagaagactttttatcaagtttcattgcatgaaaacatcaaagcaagcagttatatgaaatacccttgtgatggctttgatcaggccaagctaacaatcagcacacaggacagtcctgactctccagctctttgttagaattcccatctctctttgacatggacatccctgtgtgtgagtgttgccttaaagctgggacacactctgcaggagaccaagaagcatattgcttccaatggtactaagtttggtgagcagaatctgagggaccaagaagccaagaccaaggtggccttctgtgtttgtttgtgaacttgagtcctgttctgtttccaaactgatgcaaatgacacagggatgggaaacgatgctttacccccaacttcttccaatgctgggattgttacagccagctccccagctaatggttgtgaacatggcctgagttcacaaatgccacagcaatccagaggttcacagaacagttactctccaagtgtgatctctataggatccataggaagtggcattagcataccaaagaaacatcagaactcccgtgattattgcagtgccattcacaatggctaagatacataaagaatcttgctacccaactgacagaggaaatgataaagacatgaaggatatatacacaaccaattatcattcagccataaagaagaataaaatccttcctttagcagcaagatggttggaaacacaggatattgtgctaaatgacataagccatactcagacaaatactacatattcttacgttaatatgaggagagtaaaactagtcaaactgaatgtagaccagtaattactagagggaaggaagggtagggagggaagtagaggagagaaggattcgatgacagagataaaaaagttatggcaccccacagcatagtggggccactgcagaccccaatgcccaattgtagattttataaagattcagacaagaggagcttgaggactccaaccacaaagaagtgataaggaggtagaaatggtacctgccctgatgtcgtcagtagatgctaattgtatgtgctgaaataccacaccatgcttcattagcctggacaatcgctgcataagatgcctaagcaaaattttaagtaatgagtaaaatcatttaaagctttttaaatgtgtgctctctggatcagtaatgttagcaccaccaaaaaaactatcggaaatgcaaattttcaatcctttccctgagctctgctgaattgaaaaaactggaggtggaaccttggctcccttcatctgttcacattacctatctgattcttacatttattttatcaacagtttgtgtttttccaagcagaatgcttggatttggttgacttaatcccatctgctcttatgattactctgcaaagaaagatgaaacccaaacaccaaaaatattagtagtgacatcatgatatatattgtatacatacaaaaacaaaaggtttttttccttttgtttaaagtaaaaacaagcttgttttacatgtcaatcccagttccctctccctcccctcctccccttcttcccactaaccccctatcccatcccttacccagggagggtaaggccttccatgggggatcttcaaaaatctgtcagcatttggagcagaacctaggcccttcccatgtgtctaggctgagagagtatctctccatgtggaatgggctcccaaagttcattcatatactatggataaatactaatccactactagaggccccatagattgccccggcctccaaactgacacaatgttcagagggtctgggtcagtcctaagctggtttcccagctatcagtctggggcccatttgttcaggtcagttgtttctgtggatttctccagcctggtgttgacccctttgctcatcactcctccctctctgcaactggattccaggagttcagctcagtgtttatctgtgggtgtctgcttctgcttctatcagctactggatgaaggctctaggatggcatataaggtagtcatcaatctcattatcagggaaggacacttaaggtagcctctccactattgctgttggttggtgtcatccttatagatctctggacatttccctagtgccagatttctctttaaacctataatggctccctctattatggtatctcttttcttgatctcctcttttcttcctgctccctcatgtcctcctctcccctcctcttctcctcttctctttctcctaactccctctctcctccccccatgctcccaatttgctcaagaaatcttgtccctttctgcttctctgggggaccatgtatgtctctcttagggtcctccttaaaaacaaaggttttggggggtttttgcagatttttttatttgaattagaaacaagatttacatgtcaatcccagttccctctacctcccctcctaccctgccaccctccctccaactaaaaccctacctatcacatatcctttctgctctccctggagggtgaggccttccatagggtgtcatcagagtctatcgtatcctttgggatagggcctaggcccacccccatgtgtcttggctcagtgagtattcctctatgtggaatgggctcccaaagttcacacctatgctagggataagtactgaactactacagaaggtcccgtagatttccaaggtctcctcactgaaacccgtgttcctggggtctggatcagtcccatgctggtattccagctatcagtctggggaccacgagaaaaacaaaggttttagaagcccattttctaacttttgtgccaggcctttgtgggtgtttacaagcatgatcaagaaacaaaggttgtagaacttcatatatgagcaaataaaatctgagttcattaattacttgtcatgtgcatagggcaactttatagttagcatctaaccttcagaatagtgcttcattctactctttcagggcacttagacatgacacactgctggccaaatgtgggcatgctgataactgaagaaagctggctttctccaagacctctggattcagaggcccatttgacatcgtgaaagtcagaaactgtgtctcacattggctgcattaggctagagtcttcaatgtgcccttaatacttgtgggcaccagttagcttatttggaagctgactcaggatcatatccctcaccactttctgttctccctgctgtttgatccatatcttgggccaaggatgaacatgtgactaatagctcacgtgctctgagatgaccagccccaggcaccactctttggagcaatgagaccaaatctgtacagagaagcatgcacaccacatgttctgattcttgggtccttctgaaaagacacccagatgaattctaaccacctgcttttcctccagggtttttgatgatggccgatgtgttttgaactgtccctcctggaagtttgaacttaagaagcaatgtcacctgtgccaccacacttgccaagaatgccaaggaagcggtccttctaactgcacttcctgcagggcaggtgagggcaattgctgctggctcctgcttcacattggtctgttctctcacaaggcagcatttggtttggctcagaagccaagggacagagctgaggttcagggcagacagctgctcattacaccaccagtacaacctgaaggctctgttgccaccaggacacataagccttgttcacataatcacacacgttgactcactgccctgagggagatgagagaggtgaagagagaggccttccccggggaagcaagaggaaagactattacatgtgttgtcaaccatgccatgctcaataaagccaagccttgttgtggtagacctgaaaagccagggaattatcaagacacatatggtccctaaaatgaataatgcatcaaaggttatgtcaggtctcagagttgagctatgccattcagatggcaaggtaatcaatctacacatgacagatgtgaccttttgggtctagtctgagttactctcagagtatctgccatcactggcatggaggccatgccctcggcatgttcctctgcagtttagtcttgacactgctccagccttgttttatatgcctgttctctattttgactttgtgagaactgggatcacattatttttcctatatagtaaacagagtttatgtttcaggcaaatttaaattttgtgcaattttaaagaaaaagagtagactattggtcactgttgaaaagttggatggtgtggttgcactaggcccatctttcccaaagatatttcagggtgaagcctcaaagaggctactctgcattctccacagtcctcgctgggtgcggtcgtctagctgatcctgaggtgtcatttgtctagtgaaagagacttatttcttttcattcttgtttacagtaaaaccaagaaaaatgaaaaaaaaaaatgacaacatcttagattggcgtgaatacagaaaattggagccctgcacttcctttcacacatcttatcactcttaagatccatctcggccataaagactttatgtcccagatgagcagtgaatgttttctacactggtctgaacatgagacagtatctggcatgcagactgtatacacacagaagatatgtacaagaatccgtagtttgggagtcagtccctcaagactagcagtcaggaaatgcacaactgacccaacatcctagattgattgattgatttctaacaagatctcctgtatcccaggctgctcccaaacttactatatagctgaggataaccttgaccctttggttctcctacccccacctcctaaatgctgggattacaagcatgcaccacaacacctggttttacgaaatcctgagattacatgtgctaagcaaatacccaacatcccagcccccagctttcttactaactagaagacaccaaaatagtcacttctttaagcctcttcttatttgtttaaaaagatagaaaagacaaatatgcttttaaaatcactttcccatccagtgggaactctacatctcaacataccacacaattagaacaaagtttagatgctaagcaaatgtcaaatagtctagtatcttactactgcttgtagcaaaccacatgaaggactttgacattttttttcatattttatacttgaagggctgcatccaatctataatcttaaatattaagtgccttcctcctttgcatgagttacaagtagaagcaatggagaataaaacacatgggaacatgatgcttgtgatggttacgagtttgttaacttgacctgattgagaaatgcttcatagatttttaaggaaatcgctgctcactcaatgtttttgtgcaagcattttcagagaggattgaccaagagggaaattccacccttaatggaggctatactaccacatgagctgtggtacagatggaggggtcaggggaatgagaaagccacttagtatgggaattcttctctgctgtgtggctaccaggaagtgagcatctccactccatcatgccctcgctgccatgatgtgctaacacccttgaaactgagagacaggataaatcttctgtcccctcaagcattcctggtggatatttctgtcactgcaatgaaaaaaactgactcactgtcaaggagtttacagactaatagggaggtttgtcctcacatactgaacaacgaaaaactatcagataaagaccaaatgagcagtcagaatgctgccacagatcatttccatatgtgatgagcagaggtttcctggagagggtatttgtttaccaaacccttacttaacatgctctctgcacaagaaaagcttgtgctaacacagcaaggatagtctatgccttgagattaccatgctgaagatgaatgcttaacctcaaaaaaaaaaaaaaaaaaaaaaactcccgaatagaaattttaatataaaaggttgaaggtcagcaagctcatgtgggtcagtccagcattatactgactttttgcttctgtctttgcaacaaggaactactgttaacttcatacacatactcagtgtcccttcagcctgaatgtcagtggtttggatctctgggtggtggctcacatgctgagtgaatggtagaccagatgttctagggaacacagatcagctgttcttcagatctggggccacatgggaaatctggttctcagtagattgagtaaatggatcaccagaacacactgagcactgcatcttcccaaagctgggagtaaggggctcctagatagacaggtagtagtaatctcagtgttgttttttgaaaatatttgtggctgtttataatcctctgtggctgatcctgatatttttcttactgattaaatgtttctgttctctccgggaacaaattgccgctctgtcatgctgggaaattgctgattctctccttatagagcccaatgttgacagaaataaaacccttagggatgacgtgaacgaagtgtggaggtgtgcatgatttaggatgtcaatagggccatccttagaacatcagtacaagcatgtgattttagtagtgattccaaatcattgtgagattatgcttttatcaagtgtatctgccaagaagtgcatgctatttttatggcatctctgtaacccccaagtctgaacgggtctacctttactcaaaggagcccttgggaaagttaaacacattttgaattgtagctatccacaaaacatggtttgtggttttgcaatgacatcccaaatagaagttgttcactcaaatacataaaatagtgtaaaatgattctctgcatggaaaacttttcagcgataaggatttagatattgcactttttattaaatccattctggtgttcttggtcccctagaaacaaaagcattcaattgtttccctttttaataaaacatcttacattatatgagttccagagctggtttctgcatcttctctttcccatgcccctctaactgatcagacaagcacggtcggggacgcttcctataccaaggggaatgtcgggagagctgccctgtgggccattatcctgccaagggacatgcctgcctgccctgcccagacaactgtgaactttgctacaacccacacgtctgcagtagatgcatgagtggctacttcatcgtgcccaccaaccacacatgtcagaagctggagtgcggacaaggtgaggcctctacagggtcctactcagcaccaggaggtgggatgagagattatacctctgggtattggggaggctttgactacctttctttcaattgtcatggtgttattatgagcacttagaattactctgaatagctcaatatgcaagtggaggtactttcccttccctttccccagactcacaatgcccaggcaagggagataaactgagatcagaatctaagtgttggccaacagttttcttcctctcaattactaggtatgagaccttgggcaaaactaatctaatttctccatgccttggggctttatgtgaaaaggggcaagcataacaccaagtaagattgacatgagaagcaagaagaatcagtgtatccaaacctacttgaaattgttgagtgctctgtgattgtatgctgtcactgttcaattactttgttatattgagagatgataagtttagcagcattgattatatttgctgttttatatgtgaatctgctatgtaaaaattatgactggccagtgtctgttcagtttcaagatacttttaattaagcaccccttgtatttctccttcctgtttacagagacaataaaatattttttaattttaaatatgtttagtaggtcaaatatagaatctgatctttatatatctaattctgttttcctagacacagaactgacttaattatatgaatccaatctactagcttgactttggaattagttatatggccaactgtggtgggtcatagctgtaatctcagtacccaggagatgaaaacaatgagtttaagatcaatttaagctacatggtgagctccaagtcagccagagctacatagccagaccctgtctcaaaaatcaaagtgaaacaaacaaaagactagttatatggaatatagtctaagcctcttctatttgtacccacttgtgtggtgcagtatgttaagttaatacaggattttaaagtacatgacatccttcttcaagatggttttgggcttcataatcgctctgtgattcacatgtaaatgaaccacacaccaaacacaatgttttcctagcagtgagcattcctctacccagtgggttgagttgtgttttccattcctttcactgtgcaggtgaattccaggattctgaatatgaagaatgcatgccttgtgaggaaggatgcctggggtgcactgtgggtatgtcatgttcctttgttacttaaaacgtttaaatagccatgtcccttgtcgcacatgctgatgctgccattgcttcagcaaggagtcttgtcatcgaggtaattatcagtgtccccatcactctccctagtatagacgttgtcacagtgaagcgatgcttgtgaggcaatagtgtcacgcttaagaaagcatagccgtgtctccccctgacactctaactcttctttatggagctgacaaataaaatcaaacaaagaaatgtttgttggctctaactcactaggtatgtggaacccaaaaggtaatgggtagagaaataaggggatctccttttgtgaaagtgaccccactgcctggggcctaagaaagtttttgtactgtggtgaagtcaagattcctgttacacaaagaaaagcatgcagactctagttcaagcttgtagcgcccccatcccttcatctcacactgctgctactctggcaaaggagaagatggggttgctttatagcacaccacatcagtgaatttgattttaaaaaatgtaaaatagggagactgtgatatcaagactgtacttttatgtaagtctaggccacatatagaaaacagcatataggatctgtgaaggaaaattccagcaggaacaaagtaatttctctttgcaggggcttctgtggagccctatggtcctctaaaatggtattatgtacatacatatcacatgggaagtttgtccggatgcagacaagctgtcagtggggtcactgcggttgctcgatagaccactttcaaagtgtcacattgcacttcagctatgtagaatttattggccttacctactaaacttaattatttgtttttttgtttgtttgtttattcttctctcatatgatacatcccaatcagtttcccctccctctactcctccctgcttcccctgccacctcccctcttccccagatccactcggcctctgttttccttcaaaaaagagcaggcctcccttttttttttttagctttttgactttattccatcttcaggacttctaagcttcttccgttagcagggatgccaacccaaaatggcataacaagatgcaataagactagtcacagaccctcatatcatggctgtaggagacaacccagtagaaggaaaggggtcccaagagcaggtgaaagagtcagtgacatccccactcccactgttaggagtcccataagaacaccaagtaaacaagcataacatatatgtggaggacctaacatagaccatgcaagctctgggattgctgcttcggtctctgtgagcccctataagccctgcctagttgattctgtgaaccatattttcctggtgtccttgacacctctgactcctacaattcttcctccccatcttctgtgacttcctttaattcttaaatattatgcatgaactataatttatccaaggctttagaaacgtgaatagcattctttcattattatctgttgtggaatgaggagaagaaatacagtaacagtaaaacttcagaaggaggtggcagtcacagatttaagggtaaaattctaaatatctgggaaatttaaacacaaataataaaggactacaattaaaacaatgacaacagattttatacgttacttatggctattttaattgtgtgttttgttgtattttgtttttacaacatacccgaattacagtctttcttaagaagtaataggagatctttctggcagcaatgatagatgttctgatggtcttgattttacttttgtccatttcaaacctgttttccacttaggtgtcccaccccaactggatttcttttgcaccttcaccattgcatgctgaacacccctgcctgcatctttgtgtatcacagtgggtggagagggagtgtttgtgtgtgttgtggggacagatcttaaacatgttgcctctcttggctttgtttagggatgacaatagaacaaatccactaagttaaacaaagaagagtaagttttccttccacatgtttgaaacaccccaaaaagaatgtacctttgaaaactccctcagattcagatagcatcctaaaaggtatatgatggtaaatgacattattctttgggagacggaataaacatctactcataccaaattaagaactgatggcagaccaaagtacagataccagaagcttggtgaaccaatgagtttatgggggttacttgcaggagcacaaataactcaaagacagctgcatcatcaaagcccatcctaacatgggtgacaactcatgaaagctgggaaacctggagcatactgaacaatctttagaaagctcaacaggctaacatgtgtcctttccaagcttctcagctgttctaagtcttttctgagagtacttgccattagtccttaatgcatacatgcatatgtatgtatgtatgtatgtatgtatgtatgtatgtatgtatgtgtgcttgagaagagaggggcctaatgaatctggtcagtttcagggacttcctgaagctattttgagatgtttattttctgagcttagtgagcttctctgcaggatggaatgtttcacctccccatgtaaacatcctgtatcttagtgatctacacaatggatgtgagcaataacaaggcaaccatgaacactgggagattcaatggcatggcttaagatgagaccaaagtgttgtaattgagaaatgattccataggagagactggccaaccagggcctggagatctggagtctccttaactgacaagtcagtctgattcacttcacaaagtgctgttaaaatatctcactcactccttaatttaggagactttagctatctgctttgtgcccagtgccaatcttggtactgggaattcaaaggtgacatggcaggcaaacatctagagatgtgcctggaatgttgtactttataaggctgacccagagtgcagggaggttcaagtatagcaaggtcaccagggaaggcaacaagaacattcaaaatgctgagttaacagccgaaattctaatatttctcttcatttacaaaatttctgtgttggatcttgtgtgttcttgaactgacttgcctgacctcaaccatgacctcatttctgagaccttgtgataatctccagtggaatgaaccctccctttctccctttcatgtgtaggttgctatgacattggtctaacatttgctatgtgcatatctttctgcctgtcactgaagggcttgcttgagaatatgctctctggcttacattgtctgctcccacaagcaaagcagcagcccaggatcataaagtacacacagttgataagcaaatgtcactcacttgtaatggcatggcttacagtgttctgactctaccatggtgtgataatgatcttagggtactaaattaggatcttgttcttcactcacaatatgcatacagaatttccccatgttgctatgcagcagcaaaccacagctgctaagagatcacaagctcaagtcaacaaccaataccttgcagtgtgctatgtgaccagtgattcttcaatatattacatgagataaccaatgtttcattacaaaacaatcttgtgttagaggcacttccttaagtgtacactgctgtgttctgagagaatatgaaaggcagtctgtgtcctagactctaggatatgctatgatgtttggtaagccatgagtattaaatacatttttgtcttaatggtatgttccatttgtgtttatccaaacataactccattgtaagaaaaaaaaaacatgtgtgtaaatgtttactgggctgaacttgagggtttctcaagttcaaaactgaaagatagctcatgagactcaggggttcagagtcagtgttttctctaattaaatgttgtatgcaacccaagaaaaggaaagaaatcatacaataaaacgattttatagaatattagaatggaaaggtttgatgaaaacatggtttgttgcattttatagttttaagaaggtaagaatgcgaactttaaaagatacttagcaagttctgcccaaaattcttcttgtgaagcaaaacatcatcctttggagagaaatctgctttattccatctgaacaatgcagattcttttttgaaggggtctagacaatctctagaggaattaaggacaagtacgagcagacatttgagacatttttatctatgctatgtcataaacagttgttgtggatgctagggatattttgagagttttatattcgttttcagagattcagagccctgtcgattaatgtctgtgttttacaactaataaaggaaaactcaatttccaggttgatggaaatcacagccagctccagggaggagctaggccttgtcggttcaagaaatgtttcataaaggagacagaaagctaacccatgaccaaaaagtgattgttttgtctggaggaaaacactgaatttgatagtctgggatcaagctgagggaatatttattattatggagtgaggtttctcttctttatcaggctgtaaacaaacagcattcctatttttttctaagaacagttgatgtcaaattctttgtctttctagcaagtaccttcactttacattttccacaaaggcaaatctgagtgggactatttgggggtgaggtaaatgaagcaattttatctgatgttttgcggtatctttcacagttttaatttagtgaaggtagtataacctgagattggagatctccaatacttatttatccattgtcttaataatggactttaatcacatgatataaaatctttactcccttacatcattaataaaaacagaagttattgtgcttgtattttggcttcaaaggacataatgaaatttcattaatttttgttccttgaaataaatgtagtctagaaacttttttaaaatttaagcaattgccaaaaagaaatagattcatatactttaagtttcaaacaaggagacaaagctatgcataagaaaaatttagacagggaccctcctgccctgaaacagtcaaaagagttttccagagaggcagtgcagaaaggagactgtgagtttgcctgtgttgcccataaagaagagggagagctgccctaagcttggggcttccagttattgacaagtggcaagatattctgccctggatttttcaccactaaatgtatgaccgttgaagaaagaatgagctattataagaaaacagagaagtgtttagagaagccattaaaaatccaaaccttgaattcagtgaatgtatttaaaatattctttagctgaagcagaacaactgaaggttaaagagcaacagacagacagaaggaaaaatctggaactaggagatgtgtctcagtagtagaaagcttgcctaatatatgtgaggccctccattccatcctctgcacttaaataaataaatatacaaataaacaggaaagtagaatgatggggttgttctgggttttttttctgtttaaaacggggtctaccatagcccaaattggcctcaacttacgatgtaggatgatctttgatttctggtcctccttcatccacttccccactactggggttacagctgtgtgccactgccctcagtgatgaagagatcaaactcagggcttcctgcatgcgggacaatggagatggatcctcggctgtagggtgctattctgaggaggtatttggctactgacttaacagtgttcaagggtaattgacaggcagaggggctgtagtaccaacagcagtaatggtgctcttatagaatccaggtagaagcaaaagtagtctagccaaggtgacattaagaaaatatgaggaaaggtgtaagcttttaaaaatcacatgagacaaatggcccccaagcataagaaaagctacctgtttattgggtagaaaatacaaattaaagtgaccatgggttgcatgactttccctgggcagtctgtttggttcaccccagatacagaggcaatagcagaccaaggaaatcatgtcttgcaagtccaactgggtaagctactgtgtttattggaggtgcttaaaggaacatgagtgagagattgtgcacaggagcatgggaaagttaaagctcactgcataccagcctcttcttcacagccctcgatcaccatttgcatcctcagtgaggtgtgggactccttaaaccttaatagcttcaagagccttcacttcctaccatgaaggaatgttaatgagtccagtcttgtgagggtctcctgagggtggatgaacagttgctctaattcaagacagcagtgagcacaccaacccagaggaatgcacaaccccacaggacagttctttacctatcagactggcatatcaaaagcacatcaactctccaggcaaggctgtgggagaggaaatacatttattccctgtggtgggaactaaatggtacagcctttgaagaacatgtgacagctgtgttataattgtctatgcattgacacttggaccctatgacacctcttctagaaatctaagctaagaatacatactttgaatttgaaaacaaattcaaaacagtgtgcactagtctacctcatgcaacaggttgagttctgagactctcaatggacgcccaacacgacagcagttcaaaaccataccattcaatgtctttccatctaaactaagaactattacacactgtggtgctaacttaaagtctgattacaacagcaaaagtagtacaaatttatttttctggtatcatgatatcacagacatttgttcttgtgcaggattgtagcaattttgccatgcccctccctttttggtttttcaaatgtccttaagatgataagtttatcttttctcttagaaacatttttggtttttccttgagtttggggggcactgttattcagtaacataaaggtggggtgaacacagcactgccactctgtaccagctaatctgttagctaagatggccactatgtgactaatagccagggtgcaaatacagactagatgtgctagacagagggaaaatttgaatcttggacaaggaagggcaaggtattagaaatcaaagccttgggtcagggaggcaagaggatattcagacatccatggtggtacaaacgcagttagccactggaagcagacaaaatgctgggctcatatgtaagcacgcagagtactgtacagccattgagacccaaaaagatctgtataaaataatagtgatttcctgtctcacaagcattctgttttgtttgctttgtggtatgctaccttctgggtcagcaaaatgttgaagttagaaggtaagtatatctacatgtgtacttgaaaaagaacatctggttgactgtagacctggagatggttgtctgtggcatggagcgagggagggctggagagatgactcagtggttaataaatcagagagctagattttagttctccatgcccaagttaggtaactcacagttacctgtaactccagtttcagaggcttcaacaatctcttccagcctctgtgtatactcacacatgtgcacatagacagagatacatgaagaaaaataaaaacaaacatttttaaataaaaaggagtggaagagataataatgaaacctctccagttgttttcatgtagctctgatcttagtcctgtgtttcatgttttcacaacaaacagtatagaacgagttgggggggaggggatgggggggtgatctcccaccgtgggcagttttgtttggggtaaagaactgaaattcaaatagttttataattttatccttaatatttctaatcattagcatatgtttcatgggttttgttgattctcctctccccatcctctctgtccccctccccaccctgtgcccttccacctcctgtaactttctttctgctttcatgtcacacacacctcacaccttcctcagcatttcttgctccctctcatttatagcctttacccacagacagacagacagacagacagacagacatatatatgtatgtatgtatatatatagcagaagttcagacccaaatatgaataaaatcatgcagttcttttctgggttatttcacttaatagactactttccagatccatccattttcctgcaatttctataacttcagtttcccctgtggctgaaaaggattccattgtggatacacactgcattttattactcatctacctgctgatcaatgaatagagtggcttggtttgcttgtcactgtgaattatgcatctgtaaacatggatggactgacatcctatggcagatgcatggtatatacatgtatacttgtgtaggtatagggtcaggaggggtattcatgggtaacatggtgttctatttttatgttttccagtctactcccatgctaattcccctagtagctatactagttataatgccaccagaagtgaataagacttccttttgccccacagcgaattcctcactggcgttctttatcttttgttttcttgatcttagctattcttactgatgtgagatggaatctgaaagtggttttaatttgagtttccctgatgactaaggaaggtaaacacttcaaaaaaatattattgttcgtattttttattttgagaactgtctgctcatttcattggcagcttagagattttggtgcttaatttttcaggttttgttcatttatagtttgtttcatgtgtatagtgttttgcctgcatatacttcatgcctgcaaaatacccatggagaccagaagagtgcggtggatcccctggaattggaattacagacagttggatagaacctagatcctctacaagagcagccagtgctcttacctgttgagccatttctctaacaccataatttttacaatactttatataatctagatatagttctgtctgtggtagagctggcaatgatcccccccccgttctgtagtcacatggcttgttctgttggccgtggcttgttctgttggctgttttcttttcaatgcagaaaatttttcatttcatgtggtctcttttgtttcctcttgggatgttttctgggctgtaagaatcctgcttcggaaagttcttgcctacatcacaaacttgagttatattttccattatttctatgtaggatctgctcacttggccatggcttgttatccaccttattacctggttgattagttggaaaaaaaaacctatcatgatatttgaggaagtaatgggaagaaaagggaaagtgttcttcattttcagaaaactttcagctggcgatgcataagaaaagcatcattcactcaaggagaatgaccaagtaattagtgtgtgctaaaatcagtgcttgcaaaactgttgggcaactagataaccacagggtcttaaaataccaccagaattgatgactaattaccagtctacacaagttactgcaattagcatctctgtaactacttccaaacaacttgacattatgtgtctactgatgaaataaattccataccaaggatactttcctctagtatctgtgacaagaatatctaggaggcaaatgggctaccatggggcatttgtcatctttttcagacattttcattgttatgcctgagatgatattactaacatctaaggagagaactcataattctgctttactgcataggaaagcatcccctagtaatagtgtagtccaaattctggaattatgagagaaacatgccatattgagctggaagacagtcacaagagaaatcccaaatgtgaaccacttgtacagtcactgacctgtacttgtaaggaaaatggaatctcagaaaaaaaattatgaaataagttaaaaaagaagaagaagaaaagagataaaaaaactaaaaaatgaataaatgtattaatagattgaggaaagagtgatcctggcaaatcaaaagttgctctgcttcagtctttcttcagatctgaaaatttttaaagggtttttaaagaatttaaaaaggtacttcatgctcacagctgagaatgcctgaacatacccacgaattagtaactatttccaatccccaaagcttggcctttaataacattctccaatagaagcaaccaagcccctttgttaaataagttgacttatgacaggaaatctacaagatgggcttgcatcatcttatgatgatagaaagtaagaaattactcaaaggaaacaaaagaaaaaaatttaaaaacccccataggctcatatatttgaatgcttgccccccagtctgtgaaaccatttgaggtgggctgactagttctatgtcaacttgatacacactaaagtcatctgaaaagaggtgccctcaattgagaaaatgtccccataagatctggcagtaaagcattttcttaattagtgattgatgaggagagggcccagcccattgtgagtggtgtcatccctgaggtagtggtctttggttctataagaaagcatgttgagcaagtcatgttgagcaagccaataagcagcacccctcaatagcctatgcatcagctcccgactctggattcgtaccctatttgaattcctgtcctgatttcattcagtgatggactacagtgtagaagtgtaaccctttcctccacaagttgctttggtcatgtttttttttttttttttttttcttttttttttttttttttttttttttttataactgcaataatggcctaagacacaaaagttaggagatgtggacttgttgaagaaggtatgtcgctgggagtaggctttaacatctcaaaagcccagaccaggcccagtcttgatctttctttgctgtcatcttgtagatcagatgtaagctctcagctagagctccagcaccatgcctgcctgcctaactctccgaaactgtcagcaggcccccaattgaacactttgcttttataagtgtctttggtcctgatgtcagcaatggaacataatagtaactaaactgtgatggcctgtctgatgaacacataaaccatccaaaaagtgtcaataatggtgatggcaaggataatctgagctaagatgtaagtaaaacattattcatttataacccagagaatataacaaatagctatgaattcatacaaattaaatagataaataagaataagaacaggataaatcttccacaaaatcagtttgaaataactcattagaatagtcttcctttacagagatagaacatacagcaaaacctaggaaactcttgatgggctttatataacatattatctgaacatcaaaacatgaaggagccccttcagagagtttgaaaatgccccatatcttgttgaaataaccctatggctgtttgtatgagcttattcaattatgaagggaaaatgttgcactgtgaatatacgtttcaataaatctgactcaaaaaaaaaaaaaaagaatacctaaattttccagttgacccatgagtacctgggacttacaagcatctcctaacattctgagtgttacttcacatttgtggactgatttacctcaccttaatcactcatgggcattctgttaaacctttaatgtgggtgacatcttcacattcactgtcagtttttacagatggggaactcaaaatcagaggaatagggaaatacctaatcttgtgtgcatggaaagtgaaagggttcagaaagtcagttttgcctggcttggtggtacatgccttcaatcccagcatccaggaggcagaaacaggagggttttaatgagtttgaaaccagcctaatctatattgcaagttccagggcagcaattttgtttataactttgttcatttctttcaagggaaggagttaactcagaaactcttatgtatatgagttatgttatatttacacacacacatggatggatggatggttggatggatgaatggatgatagatagatagatagatagatagatagatagatagatagcagggtgcactataatatcagacatcagtgacttcagtcaacaaggatttaatctctcatgctgtctcttcatcatggatcatcatctgggaaagctttgggggggttgttttcaatccagaacctgatagatggatcaactaccattcattcattttgttttcttcatctcttcattgtcgtctttctcatagtctgaagattctgtcatgttctgatgagtgagtttctgacaaagctccagatgactgggccctgacagaagctgacagtagaagaaatgttctctgacactcagttttcttcttgattgctgtgtcagaggccctcttccatagttgtcattgtcactgcttcctaaattttatatttcagtatatatcatatgtaatctaggatgatttaaagtatatcagaggtgggatgcaagttatatgtaaataccacatccctatatgtaaggtacttgagcatctacagatcttggtaccataagggattctgggaagaatcttctacagatactaagtgatagcaatagccccaaatgtgtacctgcttggcttccctacgtgagtagtcactctccacccttctgaccttggaaaaggcagtgtctttctccaaggaactcttttgaagaagtcactgtttttaaattggtggaattttccaaaatattcttctatcacacttctctgatctccagcagctaatgatgcaagaggaggagcagtgagcaatgccttgtgaccagtgagtgagctggtggggaaaagatttgacctttctctattcctgactctcagatctccactgtgatggtgaatcttcattgacaacttgactggatggaaaaatcacctaggagacgtacccctaggtgcatctgtgaagatgtttccagagaagcttaactgaggagggaaaatccatcctaaatatggggctgcaccatcccatgggatcgtgtctcactctgagtaaaagtgggaaaaggaaaaagtgagctaagcattggcattatccctctgcctcctgcctccatatgctatccaagcagccagttcactctcctgccaccgtgcttccccagcttatggactgcactgccttaagccacaaaccaaaatccttctgccctcaatcgtatggtcagaagaatgaacaaaatgctttgtctttggatgattttattatgtacatgccaagcaaaagcagaggagccaattgcacttagcagttacgtagacacagtagatagacaaaagccgcagatagcaaaatgtcgtatgctcacaacatcaagcagagataattcgggtagttgaggagtcagctggaggtcccagttccaccatgaatgagtttccaggtctggaccttggattcccattctcggtgcaggagcttttataacacaggagaaacaatggtgacatctgttggaaacagctcacctctctattctcaaggacagaaaggttgttttacttttctcttttctccttgttacagtgttggggtggaggcaggccattctcaaacaaggagtcttggaggacacttaatataacatgtttaagtctacagaaggggctcaaggcaactccatttccagagaaagcttcttcacaggtttgaacagcacatgacaatttatcaatatggtgtacatttagtctcttaagctgcttcttgtggggtatttagtcacattcagaaaggtacctagtgcatccatagcaagggcaaacctatgcatctgtaccttgcctttatctacttgtcaagacatgcatcagcctgtatgagaatttggacaagcctcttcatctttcggtggaggtcaggaaatatatatatggagcacctgtatctgccaacaaatgaagataaaatgataaagaaacctctctctgtgtatcaagggcccccatggaaatgagaggtagaccagtagttctcaggtctagctgcacactgggatcacattgcccatttgcagttttcacctgacagctccaaagtgaagcttcagcctaaggtttttctaaagctctgactgatgctattctgcaaccacagttaaaaatcagtggtcaggagcatacgtacatacataactcaacattacatttaaaatacttctgttgatgatgagagctgaagcagacacagatagataatgttttaataactaaaatttaatgttctgtccatgctacatataaagctaggcagatacttaacatccttagtatagccctctatccaaaacccttattttcatttgataaatgaggaaagcaatacacaggaagcttatgtaatttgcccaaagttacacaacttagaaaggtttagagccaaagctaaacttaggactgtctggatctaaccctacagaccatccaaatgctctccgctttccagaccagcctgtattcacctcccatttgcctagagaaaagaatgaaagttgtagaaatcttgaactgcttcatctgtgcctgccctcgttgtaggcttgtgttcttgagtgtctcctaatgcttcccttatttcttttcctatactcgagctcacattcttattgttatggaagagaaggacatattggcaagatatcccaagctcaattctggagcaattagctcatcatcttggctcttcacgttattaaactgtttgctcccagagctgagtaacttattgtgtaactgacctgtgaagttgagctctgagccaaggctgtctggatcacgtaggcttacagaaagagaactgagccaagcacatccaaaataaacctagttaaataagagatctgagtggtcaagcacaacacacagcaagggggggctcagaagaccatgtgctgctctgaagagcaatgtgatgttgagctcccagtgagcagaggcaggggaatgttgggcggagggttggattttattttttacagaagaatctagctgtttgtggtagtgcacacttgtaggatgcactaggcagaggcaggcgactcacagaagaatctagaaacttttttagtgggattaagaataacctggaggatggaaacatggctaaggggttaagaacaaatgcagctcttccagaggactagagttccattcccagagccagtgtcaagagacttacatcctcttgtcactccaggtccagggggtcagaggccctcttctggcctcaacaagcactgcacttatatgcacatatctacacacacacacacacacacacacacacacacacacacacacacacacacgcatgcatgcacaattaaaaataaagtattttaaaatgagtaaaccatgaagccattacaaattacttccttttagagaagtatatcccatttttttccctgaaattctcaaggccaccaatgcctctactttgtctgaccatgaacattaaccagaagtaacagtaaagaactttatgtggttaggtcttacctacttttacggaggtgcagaaaatagagtcagagatcctgggaagcattcatctatatctttcccctacctcaataaaaatatatgaccagtcccatacattgttagttaattctatcatctaataaaagaaaacttcatttaagctatactcctagtagctatactcctagtatcttctagtaggacttggtgattataatgaaatctaggaagatgactgccatagcattgcttctttaagataaaaacaagatttgctgttaatattaagatgaattttactgttttctatccattagcatttcctcttttctgtcttatctgacatcatcaagaagcctgttggtttgtttgaggccacatactcagcttattttccatggtgcatttagcacagggcttgacactgagaagaccttcgggaaagacctgtgacttctgtatgcattcgtaactgtcctcatttcattccaactccccatttctccatcccgaattaaatgaccacatcatagtccttaaccagatggtagcaagaacttcaagcttcactagttatggggaaaaattgatttaagtcacagagcagaaaccaggctagcgagaagctgaatgtagctgaggcagaagcatctgcacattggtgcccacctgttcaccaggctggtctccaactcagagctggggtgatcacagtcaccgggaaattgcttctgcccctctagagcctggaactgtggctttctgaaagtcagcaggagggtaatttgaatggagtccagactcatcgttcccatgaattcttcccccagctcctatcagggaaaccttggcaaaagccctcacaaaagccctcagctcagctagcaggactgtgggtcaactgaagcagtagtagcagaatgggaccaatcaacacagccaaatgaagaagaccatgggcttcagggcaagacccaatagggccattcctcacttacaacctattgaccattaactcagagtggataaggaatatccatgctaacatcttaaaacactagtcacattctcacagatgatgtcactggccactcaaaacttttccttcccagctgtgcatatggtcatgtgtaaagaacaatgttaatgtttttcaagatgttttctataaaaacggtgtgttctaggtatcgctaaacattcatctgggtaagacaagtatatagtgttttgcataaactaattaggttaataaacatactccccaaacctcttgtactaaagacttgatggtactgttagaaggtggtgaaaacttaggtctaagccccagtgaaaggtttagggccttgaggacatgttcatgaaaggaggagaattaggggtctagctccccccctcttctccctccctctctcaatttccttcctggccgccttaggtaagcccctttgttcaatcacatggtccccaccaccaggctctgccttaccacaagttgaaggcaatggccaagtgaccatgaaatggaatctctgaaactgttagctaaatgcaacctttcctccttttttaagttagcctttccaagtattttgttatattgatggaaagctggctaacaatcaagattgttctgggtcatttgttttatagcccaaggaccagggtggtccacaagaatactaagagagtgctccccattccgtcaagccatcatggcaagggcaaacttgattcagatgtggtgtcacctctaccagggtgacatgtatagcctggagatgcaaactgtagaatattaggggagaaacatttctcaatctctctaatttggagcagaatgggctggcagcttgcttcatcatcacaatggaattttacaccctcaaataattgctagaaacctggatgttccaccagaaaaataaatcaacctaaaaatgtagactccagattaccatgacccaatatttgagtgatgacatgagcctttgggtcagatttggtgagttttaaaagacaaaggaagttgttttgaagtagtgcttgttggaaagcctaatacaatcatgattactgctccagtccattgtaaagtttagatttattgtatttaacagaaatgtgggctgtttgtttgaaatattatccaaatgatctggcctaaacttggaaactctatatgagtcaaaatgagtaaattatggaggcctcatgccttcagcactcatggatttgaggtgagtagagaccatttatagtagtgataaaatactgcatttaagcctgtaatactttggcacacaaggtctcagttcagaagtaaattcattttatgtgctcagcaaagaagcaactgaaatcttttacaaatgagaaggatgacctcctgagattttagagataaaatatgtccattattccttgggaagaggcatgataattatacccttgactgtggaaatccaagtctgaaccatggagcaaacactttactgtgatgtccaacatggtaaatggtagttagccaaagctattgaccaactgcatattatgtgctcaaatgttcattaatatgatgagccacttggaaacctagcacataactggggaaagcttcagggccctgcgccattaacagcttgtctagtgggatatcatgtttggccaagaggctagtgattactgggaattctatccctgattctaactacaactagtagataatgcttgacaacaatttgtactttaataagagggccttgctaactgtggcctcctatacatctctgacctcatcaaaggctacctctctagcctcatgctccagctgcaccagagggtccttgtattggtcacctgtaccccgttcatgttccaggactctgcactagctgttgtctcataggaatgatcttctctaaatgttaatgtgacttattctttcattacatctcaatttaaatgtcaacttgtaaaaaaacttccttacaactcccagttcagcctccccatccctttctctgtctacccatacatgtcaatcatcctgtgtcaattctggcagatgatgtgttatttattatctgacccttccatctttattgactttttaattgcatatgatgtatttcttctcaaagtgtagtttcccgggagtcatggaatgactctcttatctttatcattacataatttgcctctagaatccggctgaccccatgtatgtgctcaatccctaatttttaacgcatcaatagccaagtcctaccaagtgcaactgtggtaagtgtcttgatggcttgtgtgtgtcaagtctgagacagccttgtcccagaactcaccttcagcatgtcacctcacaagagtttgaggactttgtatgttcatgaaacagagtgtaggactagatagctggtctacctcctctactctgtgagggcctctcccttctctattacccacagtcctaactaggaatgatcagttttacttgcatctttgaggggataattaacctacaagtaagaattgttagcacttgtcataaaccacggatttttctttttttaatattttatttattatgtatacaatattctgcctccatgccagaagagagcaccagatctcattatggatggttgtgagccaccatgtggttgctgggaattgaactcaggacctctggaagagcaggcagtgctcttaacctctgagccatctctccagcccaaaccacagatttttctgatttacaattcaatcttgtgcctatcagacctttagaaagatagccttaaaaattaacaaaaagacagggaatttattcaaccttccttaaaggtgcgttaaatgaaagccaaagtacgtacaattcacatgtactttcctagtgttaaatggtgtaattcttccatattggaatgctattatagaaatatccatctaataggctagctaagtacatttcctcaaaaagtgtgacaaagctgtcatcacagctttagatgaataaatagttcattataaaaaataatcacatatatttgtgccatgtaggcagatttggcagcaatagacttgaaggaagggttgtggtggctttgataaatcacaagtatctccaaatgtttctaaatgtgtgcctaagtaattcttattgtaaattaagcttttccatacattagtgtaaaactgtggtatccagaggtgttttttggaagctgaatcccatgtccctctgttcacatggctaaatgcacaagctatgtaaaggagctacgtaaagctaactcctttcttctattactgaccctttgccctagaaaatactagatattcctaaagcatatcagtgctttgggaaattgccttgtcaacaatagcaaacattagcacacttagacagtcccacgtacacctattattccatagtgtctgcagaaccagggtgaaagtatgaatggctttcctgaaaggccagtgacactctcaaagcaaagggagaaacgcaaagcatttccagtccatgaagttttgtccattagaaagactgggagatgctccctcattgaactccttccggctaacaacgtagaccatctggagcacaaaggctctatgcctaagaaaagagacagtgttggtgtgccttcccctttcaggggtgctaataaggaaaaatgctgaactactgtgattacacatgacttgaaaatagctcatcacctgccaatatgaaggaaggccccagagggctgttaaaatgctgggaagaacaatagctttggagacagactctttgtgatgtgtgagagaagcatccctgcagactgaaagacagcccgccttgtgcaacgagttcttattgtaagtgaaccctgaaaactggtcctggggtgttcccatggcatagaggaggcaaaagcgctttcacaaaacaattgggcccataaacttgaaatgaaggggagagatggccagcaattatccagaagactcaaacattagataagcagccaatttaaggtatttcatggtggggcaaggctttcctcaaatttggcagataattgttagcccgctgtctactttatgtgttattgtgtagacttaatcacactgtgaaatccctcttgtcttcagtcctaagtgctactggaacgctgtgagcatggtcacatgaggttcattaggagcgggagcttggctttgtggagcctggctagctggccgttccctggaatcttttctgtgatatcacaaagctcctgtgttacagccattgtggaccctgaagcagagcatctcacagcccagcaagacataacgtctcatggtggcctgcctcattggcaggtgctaagcttttattgttattattacaatgattctgtttcaccctgaatcatttagactgcatattaccacagcctgagttctcatttatggacaacttttccttttatttactgaagcttcaaaataaccaggatttatttatggtgtgtgtgtgtgtgtgtgtgtgtgtgtgtgtgtgtgtgtgtgtgtgtgtctgtctgtttgtctgtctgtctgtctgtctgtctgtcttttgggaatgggtacaaggaaagggggttctcaaaactgaggagggaagagggcagttcagtcatgccctcgtaaatgcactcgcagggtcatgcatctggcaaagagcacacaggcttgtggggctacctttctccataatgttctaacatggactggcaggaacaaggaactgatttgtgcttgagagacaaaacagaaaacaacatgtgttcccgatctctcagtgccttctctgatgtatcagctccgaatatacctttgcttctgacatcgtcatctttcccatgattcctagctcctacttcagcatcctaccttagagcaactttgaaaagtgaccatatttgaaaataggtctttccctttttttgcccatcctatctcacacatatgcatgttcacatcctcagcacctggtgtgtgtttctcaaaaccagaattttcttattctaaataataataggtggcttcctttattttcaaaggtccatggtcataaaagttgtagccttgtgtagttcttatcaaagtcgttgtgatacacatctgattacctagtgtggaagccaatgcaggtcatagaaatactagaaagtagtttggatcttctgaaaagtagtaatgctgggtcagtggccagtaaaatttcacaccgagttctcagttccccctaattacaagtttggctttggccaagtccctgagaacttctggattttagtttcttaaatctataaaatggaagaagtatcaaaagtgaacaaggttcctaaagtcaaatacatgcagatgggtaccatcgtccagtagacaaggtggggatgcagcccacccgagtgttcctgcagaagacattttctccttggccctgatccatcactgcaaaacatgaggcaaatgggctttttgtatatactggagatcaaacacaaggcctctgtgtggtgcatatacactctacctttgagttataatccctccagatcttttcatttcttcaaacaaatcacttctgcaagctagagtccagccatcacttacgaacttctggcactcggggtatttccatccctactctctgtaacatttaaggccatccagcaaccaacctgcaaatttcattcacatctgtgtgtgtaccttaggaaatggtcatggaggccttctggctataagtgtttaagactggtgctaatcactcatccaactttccatgggtctgagtattgctaatgaaaattgaagtggtgttgctgactttgagaagaagcagcttaaaaagaacattaaagaaaacaaagctccatttttaactacaggacatttctagccagaggcatccataagaaggaagagcaagtgaaaggatttctgtataatttaccacacgcctctggagacttagacaaacctcccacagctgtaagaaataaaagcttaggaatccagagaagggggcaatcaaatgcacctagtattccacagaagtcatcaaataacagagaggcggaaatgcgtcgtgatagataatatactgagcacagcaaaagtcccagttcaagaaatggttttgaagagaactgctttcaaaatctctgaagtttttaaaggtagaaaaataagcagaggctgcaaacccagagtgggaaagatgcctcctgattaatgagtagaacgcgatcccgttgccgtggcaacttcaagatacacaaaagaaaacatcacttctctaaaatatgcctggcgatgaataggcaaaatctttcagaatatcttttttaaaaatatgaagcaactactttttaaaagggcgaatcacacagatgactcttagagttttctttttcagatagcaggacttgtttacagaaggcctaggccatttacatgaaccagcagtttgggccaaaagtaatgaccaaatagtacatccactggaaaataaatgttgttctcaacagttttgtttctgtttaagcagtaagtgagataaatggatttgccttgttttccccttttccaacaatgcatttagttggagtacttgcttggatgctcagcatctgaacaggtctaagaggcctgaagatgaaaggctaggcctgctgtagccaccctctgtggtgacgcattgtttcgggcaagctttattagatcataaacaatttatcaccacagctctccatctgacagaggtgacagaaagcagggtttggatgggactgcatgctgccttccccagccactcccctgtgctgcaggaccctggttccatgtctacaggagttgtctgttctgtaaagtgattcagctacagaactacactctgaataaactagatattcaaagcagtaccttgaaggctatgaggacaaagtgacctggggactccatacatgataaccggagtacttttttcatttttttctttattacatttatttatttatgttttgagtcagggaagcatatgccatagcacgcgtatggaggtcagaggatgatatgttggttctcttctccatcatgtgggttgtggggatcaaactcggattgtgaggcttgggggcaggcaccttgactgcctgagccaatttacccagataatggaatgacgtgagaaaattattggtgctaagcagtgtccccccccaaacagtttttcttctccttttgatagtttttttttatttttttatttttttatttttatgaataaatatttcatttatttacttttattatttatttattctttattttttattttttttatttttatgaataaatatttcatttatttacttggacttgcgtgcatgcacgcacgtgtgtgtgtgttggtgcttttgcaggggtcagaaaacaactcggagtcagttatttccttctacagtgtgggttctggatccacctcaagtcatgcagcttttgcaacaaatactttacctgctgagccatttactttactctcgttgcgtgagggtgaaccatcatcaagtcggcaaacaccctgagtgcctgatggctgctgtcatctcctgcctattgatgcaaaatccttacaccctgagatttgtggcttacaatatagcagtactcagctgctccagcccaaaagctgggaagccttattcttccttcacattctggacttggttagctaatcatcagtcagatctctctctatgactcggagacaagtgagcattagcgggggaaagtttcctgcaagggggaaaaaaaaaaacaaccaaaaatctcagtgccagttatggtagcacacacattcaatggtaacactggaaaagccaaaagggctagcctgggttatatagcaagcctctctccaaatataataaataaaatagcacatacacacagcaatagaatgattacagcatcagtgccaccttctcagctaaatagaaaatacaaagctgccgtatgacctcccagccccgtcactcctccctcgacgtaaaccacccaggccagctggatatgatgaatttcttctccagaacacagcagtcacacaaagccttcctctttccattagcaagaaacacatatgaaggaagggctaaaaatgatcttttcaaacatgggggcaaaattaaaaactaatgacaagtcatatccttgatgtcccaaggcagctgtggcaatgcacccgcaaccaaggggcttacaacagtagcagtgtattctccctctgttctggagtgtggcagtctgaagttgggtgtcagtcacttgtcagctcttctgacacctctgagggaggctcttcagggaggtgttgccaccccctggtggctgatgactatctggcattctctggcttgtcacagcgtagctcatctgtgcatctgtgcttcttttttctgtgtctccatatctgtgtcttcacaaggctttcttaaatggaaatgagctttgtcagtgctcgccctaatcttagtgactttatcttaaccacctattacaaacaaggtcccatctagaggttccaatcatttacatgtgcacatatcattgagggtcataattccattcaagtcatttctattttttcctggtttgagacagggtcttaccgtgtagctctggctgatccaggcctccctacaaagaccaggtggcctcaaactcccctgagtactaggatttaaggtgtgtgctgcacaccctactcatttcaactttccatctttcattctgtctacttctacccatctcaacagtaatcatgagttatttaacaaagggtacatgatttaagaaatgtatcatttggcagtttcatagctgtgtacccataaagtacacttgaaaaactcagctgtctatgacttcacttggccttctaattaattatatgccctggccaccacgtatgtgatcaatcattgaccaaaacatcattatgaaacacgtgactggggctcatctctggatgagcaaagaggatctgtcctaatgcaggccccaccacccacaggcgggagccttagactgaataaaaaggagaaagtgagctgagcccccgtatccatctcctttacttcccggactacagtgactcactgcttagcactcctgcctgcccatgatggactgcaccctcaaacagctccttaaatgttaactaatgcctgtttccattctctggatgcatcccctgcactataacatggggttctctctaaatgagaacctagtggtagctgtttccaaatctagacactttcctgtggccctaggaaaaaacccacactccctctaagcattacacagagacttttcagtccagccactgatctctccaacatgttcgcatctgtctcggtttcctcaactctggcattggctttgtcctccagttctcccaaaccctttgacatccttttatttaaaatcctgcacatcttcagggtaaggatattggaaactatgggatattttctagcagcgtctctccataccttcggccttttgcacatggaatagctttgcttccttctatctctcttcctctaactcatcttttagttctcaatctttacaagcactagggcatcatcccatgggtttctgttaccacacccactacacacagccatacacagtctatttgcttcttagcactatccttctataatcctgttagttatgagagcgcatgacatttgttgtatgatcttttaacctcctgtattgtccccagactctgacttccaaagtgtactaggaatgagtgacctctgcaaccctacttagcatgtgttaggattcaaaacatgcatgtgagtcagtgagatggctcagaagatagcagcacttaccttcaagccggacagcctgagttcgatccctgggacccacatgatgtgggaaagatggcaaaacatgtatgaatgaaagcacatacatatacatacaaaataaatgcaattttaaaatagataatggtgtgagctcctggctccaaactatatgtatgtaatgggggagtctgggcataggacaaggcactgtggctagagtgatggataagatacatattccaactgggatagatcattagtgttcactgttcctcgtcctgataaactttgggaagctactacagctattattggtagcacaggtgaaaagtccctgtctggcacattaaccagacaaaaaaaaaaaaaaaaactcttcatacagtcacatgatggggaaacttgtccttggccctccatccctcctggttcttaattccggagtttcatcacagtttctaagattttgctttcactgctttgggatctttctgaaataattaatgctctttcactacaaacttccaggtcttttctcagactttcacctttcttattgtgtactgtgtccctttatcctcccccatgggtcaatagctgctttttgcttattttgtaatttcactatgattgtcgtgtagatgtaaagaaagaataatatcacacaaatgtgctgcttcctgtaactgactgacgccttttaataagtctctaaacattctcagttgtctattctccttcagcattgtccctccccattctctcaatcatttcttcctggaatcagccattccctgggtcttactgtgtggtaagtaggacatttccccacacagtacccacagagttcttttagtttactatctgcagagtggatcccttttgttaaagctccccattagtaggtgactctatttgagctagtagtatatctcagtggtagttttttgcctcgtatgaggccatgggtttaatgaccagcaatggaagggtgagaatgactctatttgatctggtcctgccatgaccctagcctcattgcctgcctctttttctctccagtccagcccttgcagctgctgcaaccatctttttcttttttcttcttccccctcttctccttctcttgttttgtttctggttactcctcttccttcctctcatcttcatccttatcctattgggctaagtccaagctggctctgaacttccaatcctctttatcctcctgcctcagcttctcaagtgctggaattacagtcatgtgtcatatacctggtccccactgatgttcctttgtgctaattgatgttccttcaacaagccaggttcccctggcccctgtctgcagaatgtcctgtggctagctccttgataagattctggtctctaatcaaatgcttactcttgaatgccattctctctcactagctcattgagatgaggtctctcttctcttcccctcacctctacagtcttcatctgaatgtctaaatttccttatgagccttcctttttagtagagctaagacactagccttactactgaacatacaggacaataaaacctgtcttcatgaagctcaaattgttgtgttgatgtcatgtgtttgttgaaaaaggaagattatatttcacttgccttctgataattacctgcttttgaagcaatttgtcaagcagcatttttattgtataattcagaagcagattaataaataaactgcttaggacattatctgcttttgaaaactgtgtcttcccctaaaatgtaagctccaaggtagatggatacatgcatggacacagtgcagtgagtggccgttataaggagtcttctgcatatcaggtctcaggaagcatggagatgtctacaaggaccttgtctgttgtggcattccatggctggaactggaggacttggtaaagtctggagccaatggaacgctgagccctcttttagctaacatttgtagacagtgattttgattatttgttcaggtcccttctactattgcaggtgctctccagggggctgtgccccactgttggctgcacaatttgtatccttgccaattcaaatatttattcatggtccttagacaccactgaggataaaatgattgaaaagcatcaacagtccctctaaccaaatattttgtattccatcaccatcgaacctttcagaaaagccagcattgacaaagctgtcatatcttttttgtatttgaatgataactgtttgaagcaattctaagtacaaggcctatttgaatttatgtatttcttagtgctttctgggccttataattagttacaatctttggatatatatatatatatcgcccaataggttatccttggtagactgaagaatgtcagggactcccctgtaaatgggacagtcccatttacaaatatatatttactcagggagaagatacataattggcaatttgctttattatctctctaagcaactgaagtattgactatttccagcaccgcttctgccctcagagggagccttggaacatttcagcagggcacatggaggtgatcaggaaaggaggagcagaaacatgatgccccactctggtttgtgagtctgaggcagaaccaggagtaaccccatttcccaatgatctgcttccttcacacagtcccttcagaaagacagtctgttttaaagtaaactttatccaaagagtttgaacagacatctacatcgattcggaccaccccccttggaagagcaccagtcaggtcctagtggtacagaaattaggaagtgctgaggcatgaaatgggaagatgagaaagtagaagtggacagggaagaaacaggaatacaaaccaaaaccaaatgacaactagctcagggcagacctgtggagactctttcaaacatgtggcagaactggctttatttgggatgggaatgtatgtttgaatgcataagaacctattcctgtgggtgtacacagaggccagagaccaacatcagtatgtcttccttaatcatttcgccatgtttttattaagctttaaaaaaaaaaacattacatttatttacttggggcatgtatatatgtatgtgtgtcctggcctaggcattttctttttttccttcctagtgttttgattttatttgggggttgagtttggatttagtgttttacaacagactccctattttgccaggcgaggctcaaggactcctgtctcatcctcttgagcagctagaactacacacacataccttgacaccaacatctttcttgtccgactaatctcttgttctaataagttctgttgtgagatttgttaaggaaacagaggccttttatacaggcaatacacacataaaaatcggattgcgttttgacaaagctgtgcgtatatatatatatatatgaatgcatactatatccatgaacacagctgtgtattatctttcactgggctgacagaaaaatgccccatgttaaatactcttgagaaagagaatgcctgggctgcctgctggctcagtttacctgcacattcatgtctctttttacagatgaactttctgtttgggcaccatttccatctgaaaaacctgttctgataaaccaatgtacaaactaatattgtaggggatgtggtaaggtggagagagagagtacaatgtaaccacaatatcctatgtataacttctgacctgaaatgctaggtgaacatgttcattaaaaaatagtctatccataaatgaggaagagctagaagcgaaaagaagacctttatacacatgcagatgaatgagcccaacagaaagccatggataacactaagaagccaaatgtaacacatgggtcatatcatggttaaatgtgagttcaggagctcaggtgtaacattcagtaaggtggagtctaagtcattggtttccaaagtcagatggctgctcaacacaacccaatggattacagacaaaaaaaaaatgtacattcatgtttacttttatgctgtcctcttcaaatttccaatttagcacatattttaaaatatatgaaaatattcacacaatggcacataataaatgttgataattaataataggtaattatataaacatacttcatacaattttttagacaatgagattatcagtacaaaagcatagagattatcaattgagatttccactgttggtggacttagtaatatgactagagctagagatctaggaagtatacactgagttcactttggtctacaacttgcctaagtgagaaagaagtcactggctaagttggtaacaatatcctgaagctcagtagagcctcattgtttggactagggaaggtgacaaagcccctaagatcatctggggatgacaggcactgggcaatgctgaattacaagagaatgtgtagtgtttgggggaacacttacaggtgtggcctaagagagtcacagtggaagtctcttaacaaatgaccaacacctgaaggagttagagacctagagttcccctaaggacagagatttagtgtgccccttagtcctttgggcagcactagtaaacctcacagtaaaggaacacaagccaggtttcagtgaggatgggagagagctctggctatcagatggaaataagccacaagaagggtaagagcaccctgacatgtatttcccccatgatcctgcagagtcagttctacttaggcaactagctaatccatggctaattcacacacatatattctatagtaaaagacagcccttaagataccgagtttcccatctcagttaaatgagaaatcaccatcaaggaaaaaaatgaaaaagcaaattatggtattttaacttatatgcttcctagatacagaacctaaagtttacacaagttctaaaaataagttgacattccttggacagtttttaaatgtttagagttccatatcaatttaaaagatccttcttattaatatagcttacaggtaatatgaaggtgagggtgcaattatataactagacccaagataaatgataatgggtgtttattggtaaacaattacacagaaaaatactaggaaccactgcagcgtttccctgctcttcctacccgattcgttgacctacctaaaagagtgatcgaaggaaagtcaagcctgaagctcctctctttctgaatccatcctcctgaagccacacccaaagggtgtggccaccattgcaggtccacagaccagatgcctacaataatattaactcctcccatggccctgattggttcacagtcaatgagaaagactgtggacattgctgagaataaaatatccccttcaaagaatgtcactgactactgggctgctattgagaacatctcccagcatctcattgaagacaggagtttgtgatgaaatccagtaatgacaattccccaaggatacagtcaaagcctgacccaaagaatggtgcagagctctcaaggtagagtagaccttgtattcctacctatccactgccatgaaaataaggcaattaacctgcatcttctctggaaagaaaagccaggtcctatcttcaacaggctctgctggcagcttctcctccatggtctctgagcagctacaagtcaccaactgtttctaatagccttgtccccaaatgtctgaggttctctgaattctgactgatcaaaatatgccaactcaaatgcttgacaagatcaaataaccagagctgtttaaacatctgacttcagataacatcttccagaacagttaacattctagattgtttaaactcctcttgccccttccagctcccaaacaacactttctggaagccactccttaagccaccccaccttaccactgaacgccaagttgacttagggtcacctccagatttaaggttgttaccctgttccttaatctaacaacagctgcctctccatggtcaagctaaatccatttagtttatgtctgactatagattttctagggtggaaaaacttctaaaataattctcattcttcagatcaaataataataataatgaagctaacaggcatccataagctattagaagcttcagttctcagtctctgcattattcatgtgttcaaactgtcataagggtagcaaattctctgtgtaaccaggctggaaaagtccctgccctcaaacacattggtatgcacatttctgaggcttggttctacttaacattttcatgagtgacctgcttaaaggaacagagagcaaactcattaagttcctagatgggagagatgaccagaacattagtgaataggattataattcccccagcccttgctaaattagcaaaactgtcagagtcaagtatgttcactgggacaggcagagaaaatggagctgcccggaggcaagctgagtcgaagcaagatgttggggaaatggactgaaaaggatgtgaatgcagaaatagactcctagtgggaactgaactatccatggtgtccactgaggactgcacctctgaaaatatatgcaggtccccattctatacagtatgaaagaagaaagcatccccacagggtttccaagaaggccagggagtcttcctttatctctactatttagcttcatattcctgggtccagttcatttgcctggttttaggttcatctcattatcctattttagtttaccttattacaaactacactgattcagacattaaaggtcagtcattgccagaacatatcatcatagcctcctgcagaatggcctctttctccttgattatttctgctctttcttgttgttgtttgaaacaaggtctcactatgtagctctggctggcctggaactctctatatagaccaggctagcctagaaatcacagagatctgcctttgagtgctgggttaaaggcaggtactactttggctcttgttcaacccttccaactaaacttctactatgagaaacttaatagatgactcctaaacacatatggttctaatcctaaaaagaaaaactgaattaagtggaatctcaggctgataatgctatagccagagtttacaaatgtctcctgttaaggggcaaagagcccagacttgggtctttgttgcagctactcaatgctgattccatggtgtagagtgttccaataaaacatgagtgagcaaagtgggtctggttttcgattggatcaaggtttccaaacttctgctagattcaattttggaatcttaaactctcagagtcttgtcagtcatcttgttcaactagttcattttgtatgtgcaaaaacatggacctagaaaatatgaagattttcatgcaacttcataagtcatttaaggctgtattaaaacattccaacattccagtggtggtggtggttcgtgactttaatcccagtactcgggaggcagaggcagggcaatctctgtgagttcaaggccagcctggtctatatagtgagtttcaggacaggcagagctacataatgaaaccctgtctagaaaaacaaaaacaaaaactgaaatctttgaactagaaaaaggtatctcaactcctaggccaatgctccttactctaaccatcatcaggctttaccagaaagttctgaggatccctgcttatctctgaggtagcagaacctctttgggaagtcttaccttaatgtctgctaccatgtcttagtacaatacataatgcatggttcaagtggcaaccttcactaggcagggtccagccaagcatgtgataaagacttgtggtgggactttctctatcctgcaaacttcaggtttccagataagcagagagacagcctcaaacagtttagaaaggatagtttttttttttttttcactgagttcaaagggtgtacttgtttggtttaactaaagttaaggttgcattaacatcttcacatgccaaaggaatcatctagggagaagttgttcttcatctcttgtacaaatggaaggagcaagactgggttgtagatcagggcaaacttccagaggtctctgcttgaaagaacttgaggtcagcaaaggcaatagaatccccgtggtaatcaaatccaaaaggggcgtcttctgggccctgctggacacagaccaaaggtggtaactataaatggagttcttaatttgtctaggtaataaaaacctgaagtcagatataaaggaaaatgctgagcaatcagagagaagagggagcaagccaccgccacaccttacctccttagctgcagctcagacccctgtcctgaggcaagagggcactctgtgtcattacaactaatgaaaacagaatggtttctttcagagtgttatgaagtggcaaacacaaagtgggtgctcatattgggcaatgtatttgttcagatttcatgggagactccccagtgacactccctcccattgctgatcatctgtagaaatgtatgagaaatatgtgtcttgggggcagaagctggtagtgaatttcaagggtatatgcagacatgcctgatgcagcctcagaagaagccaagaggatcctgggatttgtttctacgatgctgaaaaccaagcacagggtctgtcttaacgcaagtactgtaactcagagctaagctcccagctgcaaggtctggaagttcctaacgaggatggtggttgcttagaaatttgaagactcagtagcttaggcctattcttccttgaaagttcagggccaaggttttttttgttttgttttgttttgtttttatgttttttatgttaagtctcattttactacctttgataaagataaattgcagtgtgctttatgtaactaattaaaatggtgcgatctgttcaaatatcatttctgggcagtacatttcataaaatgtaccttggaagattagctgcctccaaccaaaacttttccaaagtccattttttccaaataccaaactcccagcgatcataatttttcattattgtgatttctttccccagatgatccaggagtctgtacctcatgcgctgcaggatattacatgtaagtctggccctctttgttcttgacattaacttttctgcagtttaagcattactgacttaatcctaactccagtgattaaagcacaagggccctgcagcctgaagcaactgtcctgtgggctattaatgactgagtgttggatttggtggtaaaagtccagatgttttcttgccttgaaagcaagccttccctttcttgatcctggaagtcatccatcatcacactggtgtctaggaatcttgccatgggtcaccaacattcagatcttgctttttatggacagctttaagaatatatttgccttcaagaaagctgcttctcaatgtctgtgtggggactttgtgccaagggaagccaggtgagatacttacctcttaattgccccctgggtgatgagagacagggaccgagagctaaagcaaactgcagataagcatcagactaacattctcccttaccagtctataaaagccaagtctgcatgtttcaacgtcacctcctttcctagctgctctcccctccggcttgtatcactgtgcttggaggaaaccaagacaaacagaaaaatgaaagggaaagagaagccagaataacacacaggctgtgtgggtcctgctcgacctcccacagctcacacatccactcttcatctttcaccgagcgcatcagaatcgtgaggtctccatcgtgtccaggagacagaaaaagaagagagagagaggctctggtgccccttccccctgcaccacaaaccagtggcaaacctatatctccacttttgtggatcaccaccttctctagccatattatctccccttggcagattctaggatctcagaacatgctaatccttcgacacccccacacacacccagctttaaaaagttcttaatctggaagcatcttcaggttttggagggggattagagatgttactttattttgctttatgtgtatgagtgttttgcttgtacacacttgtatatatgtgcatcacatgaggaagtaagtaggcataggatcccttggaactgaagtaataagtagttgcgagctgccatgtgggtgctgaaaaccaaactcagatcctctctaagggcatctagtattcttaactgctaagccagctccccagttcctatacttagtcttctgcttgcaatctagcttctctagaatggctcatcactacagtgactatgttgtcatatcattcctaactcattcatgtgggttttttttttttatttcagagagcaggaaagctaagggtgcaattcagtgggaggcacttgccttgattctacaaggccctgaatttgaccctcaggactataaaagaacacattaaaaaacagagggatgatgaagaagccccaagttgatgattataagacaaaactgaatgatatttaatgagtagaagataactgacaacatatcaagtataatagctagagccaagggtaacagcaaagatgaaccacagacatgcaggagtttcttagtgaagtcacatgggagggacacacaatgctccatgaataactggagaaaaagaatttaatcttattctctctctctctctctctctctctctctctctctctctatctctctccctccttccctccctccctccccctctctctctcatacacacacacacacacacacacacacacacacacacacacacgtgtccctccaatccaattctgtccaggtcaactgagtcttcaatttgaaccctgcacaaatgccttccctacacctgcttcctctcccactcccatgacacaagacactcaccagatcacaaatgagtgtgtttcataaaaccttctgagaaagaaatagtctgaaatagcatgccctatagcactaagacacagcctgagataactgtttcaagaaacacacgtttacgacatttcagactatttagcactgttgaatagttgatgaagtgctgtacaatacaagctgttaagaaggaatgcaaacattttcccaggtgtcttactgaaactttgaaatcctccaaagaacaagagtcagcttcacatccctccaagtgagttacaatatcttgctgtatagtgagcacagcgagtaatttagcaagggtccatatgtgtacatgcatagggatgcgtttgcatgtctcatgtcaaggcacttccctgttactaatgatctggccacagacattctagtgagttgcttgaactcaacattgggccacctctgactttctaagagaactgtataagctatcaattcccacaaacttcacgtggccctaccattaaggagatgctggacactggaggcttgaacactgtttcctatatgtagacattaaaaattagtaatgacttccctgggggatttgtgcacaggtttgaatgaacggatacttaacatcgagcactaaataaatcagtctcagtgactctaccctccccagcctcctccaagctccccagataaagggatcctcaggggtcaagaggaggttccaaatgatttgatttgattggcaggaaagaccaagtgcaggtttctgtccttgacaaccaatcgcctgttcaccatgctacagataaatgagcatgaggagatcaaacagtgatgattcctagcacaacacagcccgtctcatggaaacatgacatcatcttccctaggtttgagaggcattgttataaagcctgccctgagaagaccttcagtacacaatgggaatgcagagcctgtggcactaactgtggcaactgtgaccagcatgagtgctattggtgtgaggagggcttctttctctcgggtaagctggacaatggtgaccccgggaagaaaaggctgtgggggcccagcaggccatggctgcaataggagaggtcctgtgatggatttcagggtctttgtgtgctggcgccaatggtccacggaggaattttaatgtggtttgaaaataaacactagcctgaactacttccttttgcatttagtattgaagtgtagttcacatttcactaattaatctcaagtatctgatgttgaatagaaaaagcaggtaccgatatggagaggagacctggaaataattgctttagaactcaagtcccctgggctagtctattcagaggcacagtccttttcttgaggtgataacctcatgttttcaaaaaaacatattacacactcatgtccactatataattgaacaagatcctttgtcttaggttttggtcaactcattgactttgttggaaatctatagttgggaaagaattttactatgagtcttccaagtgggatcaggataacccagtgatcttgggtattgagaatggagaaactgccgacaacactcagtgagtcggtggttcatgttttctccctctctgcccccaccctcccgtatgtgtctacacttgtgcatgaacatgtttaaggcatgtttgtggaggtcagaggacaaccctgggttgcttccatcttttgtttgagacaggccctttcattggcctggaactttgccgtgtgggctagattaactggccaatgaactaccaaggatctacctgtctccgcccccatctctccatcactagtattacagggggccccaccatatccatagtgcctaacttaaatgtaggttttatgaatctgaactcaggtcctcatgcttgcaagacaaccactttactgcataagccatttcccagcctctcagcacttctccatcctctctctctctctctctctctctctctctctctctctctctctctctctctgaggcaggctctatgcaatcctggctgtcccagaacttgctatgtagaccaggctggtcacaaactcccagaaatcctccatcctctgcttcccaagtggtaggattaaaggcatgtgcctcaatagttctctcataggctcattttatgtgtgtttattgtcttggaggtgttaaaaaatctttattcaatgttccttgctcttagctgatggcaaattcatacttaagtttaaaagaaaaatgcatattgcatgtattagaacatactctttgattaaaatagccatcttggtttgcacacatgcaaaaggaagaaagaaagaaagaaagaaagaaagaaagaaagaaagaaagaaagaaagaaagaaagaaaggaaggaaggaaggaaggaaggaaggaaggaaggaaggaagaaagaaagaaagaaaagagtcctgaaagtccaatatctgcccttgcatagtgctaaaagtcagagtctctccttcatgctttttccctgatcttccaaaggtggcagctgtgtgcaggattgtggccctggcttctatggaaaccaagaattgggagagtgtaagccctgtcatcgagcctgtgagacttgcaccggtttgggttacaaccaatgcagcagctgtcagaaagggttgcagctgtggcatggggcatgtatctggcccacctggccccgaggaggggaaggcaagttctggaatggtatgtacctggtagagagaggccccattcctcctctacctttctccctcttcagcattgtttctgagacacgtgttttgagggaaaatcacatgctcccagaccaccaagtcaaccagtagctcaggcttcttactagctaactcttatgcttaaattaacccataatttttatctatgctttgctaagtggcttggtacaaagtgcccatcttgctctctctgattctgcccctcttcatcccagtatcctgtttgattgccccacctaactttatcctgccttgctacaggccattcaacttctttattaaccaatggaagtaatacatattcacagtgaacagaaggatcattttgcagcatcagggagcttgtggagcacaaaggtaggaagctgaagtaggcaagggcaaagcagaggacaagatatgactgatctagaggcgggagggctactaagaatgacgtgcagtgtgacctaactcccatcttctcaaaggctccagtacagcttctaccgtgcacatgtgtctctacaaaaaggaaacctttaacctcagggcggccttctcagtgaccctgacacattggaactgatgctaagcagacaagcttgttggagcactggcactagcgttttgaaagcttctctccctttctgcaatgggggcacataactcagtggtccagcacttgcctagtgtgcatggggccctggatttgatgcccagcatgggtagatggggaggggtgctgcactctgccgttgcacatggggaaagcctggtcttcaaggaggtgtcagggaggaaggagaaatgtgagagctgggactggaaggacccgaaggtattcacctgcctcggcacctttagacttgacctctccacctttgcagccccactatgggcttccttccaggtaattataatcgttctatgataactccatgtctgagaaggctaaaacccaagtcctttttaggctaggagtctgactcacattctgctatgctataaaaaaatgaaggtgttttcatatctcggggcaagggtccacacagtacagagacagtgacagctgtaggaggccacacaaggcaaggaggaaggtcccctactagtttcagaagaagggtgtcatagctgctgtccactgtgacacttctgcacatctgattttcctaagacaacaaccaaaggccagaggaccctaggctgtccgacagagggctaagaaagttactcaatccagattgggatatcttctgtgaattatagctgaaccaaaaatgctgaaaatgagttggtctggcatttgggctttaagaagcagtacaaagccaagagggaaacagtctggtgctgtgcttcttgccccaacatctgtattttatctggcgtccagatgatgaaaaggtaaagggagccaagagtcagagccgactcgattccccaaatgattacatgtctcttcaactggactacgcattttgcaagcaaaaatcagactttgattgttcccctttgtcggagtgccacacccagcctgccatcctccccccaccccccacactagcaagggagtttgggagccaatgagaatgtttctcgtggctggacaaaagcaataaagttgaatgacatagctgcactttccatttctgtgacctatgaaataagacatgcagagcattagcaaagagcagggatgtttgctcactaagcaaggtaaagccacagtgcaccttccctgcacagctgaagcaccaagagggcgagcaaatgggaaatgcagccctttaagagtggggaggattggcaccaatgcctccatctctcctgccttcctcccctagaaacaaggtcaggagtgtaacaggagaggggagagagttccagagagcaagcactaattagccacacctctcagatgatgaggaacagatttcagtcatcctaggtcagtctcgtgggagccttgaccaaaccacggggtgtttacaagaaaatgtagctgcctaggtggcatcagccagggcttcagtctcatttggacttttaaaaaacagattcagatgcaggtagaatactaggatggcctgagcttcagcccactccttctccgacactccttccaacaaaaacaacatgaccatgttcagatccaaaggtcatgcccaaggagtgagcataggtctgtgtgtgtttggggaagtcaccttgagaccaaatgacactgtgttcacgtaactcttttcttagcactgtggctaaacaagatgacaatgacagcagtgagagatccctcattctttgccactctccccagagtgattcccttctccccagagtccaagggtagagagatcaccacataccctgagtctcaaggatggcggctctactatgttttctagccatcagaaaagtcacaggaaggcccttgatcccactcactaacactaacacttaggccaatgtttctaaatgacagaaatacttactgaacaggtgacttgcatgtagcgctgttaaaatgtccaaaggcatcaggacatcagattgcagaggcatagctttaccaggcttgggaatggaaacagtttccctgccgctgttaaagcattttgctctactggagcgtttccccctctggtagtctcagaaagttcctgcaaacaggcctgagagtcccccagcccaccgatttccctcattgattagaaccaggtcaaatcaggctctaattacagattgggacaaaggactaatctacaaagcacaagcttggtgaacaaacgtttttatctttgaccacatcctaactcaccactagctgctcttttgatcttaattccttagctctgggaaacactggagtccatgaatttgtgggaggaaagtcaacatcttcatggagaagtaaatgttgtgtaatagtaactgcaggtgactttgaagatgccacagattcctagaagggatttgttgccctcatctaggaaggatggcagcattttagttacttaaccaataggaaagccaaagagcaaatgctcctgtgagataatcagacccctgtcacagtgctacaaagggaccactgtactggcttgtgctaactgttaagcatccaggaattgtgtatcaccaggccattgacagcctaaaattagctatggcagaaatgtttacacgacaggaattggcaacactatacatcagcattgtcgcaccagcagaacactattttgatctctctcaaatgactttaaaattgaaattaattgctcaagaacatttctagtggacatgggctttcatgataggcagacctggaaacttccagtgtgactgaatggtagaacagttgcctcctgttcatgagatcctgggctggatccaagcgctgcaaacaggtaacagtaaaaataaccacagtaagagcaataactctagagtcgtgcattcaaatcctggcctggctgttcacagcatggtaaccctgagtttgttctttatcctctctgaacctcagttccctcatctgtaaaatgagagcacgaaaccactacacacatcatctttgacctgagaaaccatttacatcccacagagcattgagagccctgtctcctgaccttttgacctacacatagaaacctgggcacaaaagaaagcaattggtggctggaggaggaagcactaaagaatagtattggtctagaaaaacatagtcccagagagcaggcattaacagacaagtcgggacgcctcgcacagccagagtcttgaccggccacaagtgcattccctcaaagatgtgcacacagcttcatgacagtaagaaccacaacagatatgtggggccaagcaatctacaaatgtaacccagaaaatgaaatatgattcatacaaatacatatgcaaaacattttcgaaagatgccttcagagaagagacatttataatattatagtattgaatggcacacgcaggctccgtgtcctatatgtagagggtgtaaatgatttcattctacaagtccttccaccttgcatttctctgggtggatctggatgtcaaagaatacacagcagctatttctgggaggtgggggcgtaggtgaagcttatcttcttcctggtcctttctgtcattaaaacactttatttttttaataaaaagaagctgtgcccactgaaaacccatctttggtgaagaacctgctgcagaaacaacgaaagtggaaaattcaaatcaaaagaggtaacagggaaatagggagaaggtcaccgcccatagccatctctactctacagaaagcaaccccagcagccagaaggccaggacaatggggacatggatgtcatgacagaggagaaaggagggtcataagaaatcagtgggcacttgggggatctgtgcatccaacaacagaggttcccaacacatccaaagacgttcttgatgcactgaggactctgcctgggaaagacaaggaaaagagacatatggccggacagggagctcagcaatagggcactgcctagcagccatgagcccctgggctccagcaccaggctccatccctgcaaatctttaattggctaaagaagcaacacataccttcctggtcactgtggtatcctttgaaatagcaaagcctgaaagactaaatggctatgataaaagagatggaggtgatgcatccgaagagtaaaatactatagagctgtcaaaaggaacaaggagtttcctaacctgtcagcaaagcctgctctccaaaagatgagttttaaaagagaaaggcaagccaagctttatggattatgtctgtaacccaggtacttaggaggctggggtggtaggcatacaagttcagggccagcctgggctacatagtaggaccctatttttaaaaaaaagtcataaaagcaaactccacaatacaaagtgatagtcagtgtgaatagatttggtatccacatatagaaccatacggactattaattatttaatatgagaataaggaccctggttttcttcagttgcctgggactaacgggtaccactttttggttagagagatttctttcccttccattcttttctctttttcatcagtgttaacaaggttagaatttctggagtggggtaaaaatgggaacctgatatactcattgtgactgtagcaaatctcctggatgctgctgttgctcaattactgtgaactgcgtgttcagagctccctctggtggacaaaaggggacattgccaaattctgtaacaagtttatgaaggaaaattgccagaatgttaaatacatataattacaaatatatatgtatgtgtgtgtgtggatatccactgatttcacaaatacatagaaaaataaaacccatatttttgtgaataagactctttagtataaaatgagaaagtccacagcaaatcagcctgtggccagacacagcatagttttgcaggtctcggggatgaatgtcacccggagcatcccagcatgctgctgccttccttctgcctcttcttatggtcaagtgctgtctccaggtgaaaaggcctcagcgccagaagaagcctgtggactttcgtgacaactgctgttgctcatcagtgtggcagcttgggcagtcatttagacacacgtgcattatgcatgtatatgcatgctgctgtgtgcattacatgtgcatactacccgtgtgtattcacatcaatcatatctctctacctatctgtactccaccctagtcttgtccccagcaaggctcagcggctttataatcagtcataagtgacaccatagaaaccaggcatgtcccccacttccctaccctccaccctccaccgtatctgtcccagtgtggattaagaaaataagaaagccagatggtggtgacacacacctttaatcccagcaatcgggaagcagagacaggcagatctctgtgagttcgaggccagcctgatctacagagtgagttccaggacaggctccaaagcttcagagaaactgtctcgaaaaaacaaaataaaaacaagaagaaggaagaaaaggatttgaagaaaggaaggaaagaaacaaagaaagagagaaaggaaggaagaaaggaaggaaggaaggaaggaaggaaggaaggaagaaagaaagaaagaaagaaagaaagaaagaaagaaagaaagaaagaaagaaagaaattaaagcagcctcagacaaggggtggaagaacaattgaagaaaaggaaagggagaaaggagagagtggatgtctgttactgagtcaccgagctaagcacttcacatacactgtctgaactgaaccactgtgttaaataaatacttcatgcacagtctcgatgagccactgtgttttaagtaagtacttcccacactgccagccttgagcaggacacactgtctcactgagcttcacagttcaagggaggaaccattttctctcattttagagacgtggaaagtagggctgagactttagttactgtatccatggttaccctactggtaagcggcactgctgggatctgatgactggtgtgagtagagagccatgtagcagactcctaggaagaggagaaggtctcagtgtatactgagtagggtgaatggggatgccagtgtgttatgagaaagtgtcccaggaactttctgaggtggcttcctggaaatgcttgccttcagatgccctcagagggagagtgcaaacacacgagcataaggacattcacctacacatgtgaaaacggcatgagttgttaaatcatcgtgttatgactctcctgtaagatacacactttctgtcactgaatggctgcaagggaaatcttgataatcagtgtccaaaggaagagtttttaaaaagaatgcatgaattctacatcttagcagtgggtagtagacagtggtcagctagtgtaaaattgaaaagaggagccaagttacggctaggcctcctccagtactgtgacacactatgcgacaggccaggtctgacttgtttcttgcccacacagatgcaacaaagcaagatcaaccttgccactcttcttgtaagagctgcaatggatctgcaattctctgcacttcgtgtccaacaggtaggtcagtgggggggggggtgatggaatctgaagccacgcaccatcatcaggcctgcacattggtagaggtttcaaatacatggtattattgatctagtcccaccatagcctcccttcacacaggcttctgggagcacacccagcaaaccagtgacctgtaataaaaataggcctccggaacaaagaaattcttcttgctccaaaggcatggtgaagtcttgggttgtcttggccacagaattttctggaatctgtgggtacttcagttttagagttccttgttcctttatccaagataagtaaagttaaggctgaggataagtgtgaggatgaacaaactgtggtctccttcatcactgattctgcatttagtgctaagaagggagggaaagggcagcaacagaataggtcatttcctaaattgtactttatttatacaaacactgggcatccacattgggtggctcccaaccacctgctgggaagaaaggagcgcctatcctttctcatgcctcactattgccgctcggctctttattaggatcaccaggtgttttagacagacacagtaacacagcttcacagagttaaccaaatgcatcataaacaaaagtcacacaccttaaaataatattctaccacacatatacgcacatacacaggtacataattaaaaataaaattgaaagtacttctttaaaaattatcattagaagaaccgtgtatgaatgtacaatgttattaataccatccaccctttattctctggcaatgtgtttcagtaacgtcaataactatctgaaaccacaatagaaccaagtcttgtgtggaccattttccctatacatacttcctgtgataaacttgaatttacaaatcagacacaagaaaagaataacaataatcaatgataaaacggagaaccacaacaatacactttaacagtttttatgcctttgagacctttccttctacagctttgacttagtgttccagacctgagctgacctcaagcaactgagacttaggttgaagccctgaatcagggaatgtggtagggagatctcacacaaaacagcattcaaaacggtcgatgcatgaaggctggaagtacattaagtggctacacccagaaactgaaacaagatgctttagaattttagttgagatggctttaatttttcttattatttttacagtatccctgtatttatttattgaaaccaccttactttgtgactccagttggcttagagctcacaatgtagcaaagactggcctcaaactcacagagatctgtatgtctccacctcccaagtgctgggattaaagtaatgcaccaccacacatctggccctatttgtttatcctttatatcatttatttattttgtagggtgtgtgtgtgtgttgtgcaccagtccacatatgtgcacatgtgtggacatatacgtggaagctagagatcaaatttgggtggtgttcctcaagatgaccttccaagttggtgttttgttttgttttgttttgttttgttttgttttgttttgtttcagacaggtctctttttggcttggggatcaccaattcagctaagctggttagctggtcaatgagcacagcatcttcctttttctatgtccctagtcctgggattacaagtactcatgactgtccccagcttttgatgtgggttctagggcccaaactcacattctcacctttgcgtgttaagcattttactgagatctcatgaacatcttagtttttaaacaattattacatttatttatttatgagtgtgagtgtaaatattccacagcatacatgtgggggtcagatgacaacttgcaggagttggttctctccttcagccatgtggttcccagggcttaagttcagttaataaggtcttgcagcaagcacctttacctgctgaaccatcctaccagcccacatttggttttgagaataacaataccttcctttccaattaaccacacatagaaatggatggagcgtgtgctgaagtggaagatgtctggaaattttgctgccacttcagtctcgtccatcacagatggggaggagacagaaaaggggaccgcatggagcagctcccatgtggctatctagatgacaggacaaagggaagtcctgtggtcactgggatctgatgtcagactgtaaaaaagaagcagcgcaaagtcccttgtggcccatttccttctcagagatctaactaatctaatggactaataaaagtaaataaataaatactttataagcctgaaatactgttccaaatacctgaactttgaaaaagctagtgtgtgtgtgtgtgtgtgtgtgtgtgtgtgtgtgtgtgtgtgtgtgtgtatgtgtgtcctctatgggtgacaatcctctggataacatgtgtgatatcaggactgaccatgacagctgtactctgtcctcctgccctgatttttaggtacatacctatggctgcacacctgtgtttcttcctgtccccaaggcacttggctctcagtcaggagtggcagctgtgagaactgtatggaggactgtgcctcttgctctggagccgacctttgccaaaggtgccaaagtcagccggacaaccctctgctcctccatgagggcaggtgctaccatcaatgcccagagtaagtgtccctgcagtacctcagagcatctccttcctcttcagagaactctctgcacagtcagagcacccacataaatgacatttgtttgactgtgacatcactgtgggcccacagtggccaagacttacaagaggccagatgcccacttctccctttgatttgtcaacacatgtattcttatttctgtgacgatagtcatgtgacctgcattgcacaggcacggaggatgtgttcttaggaaagcatcattaggcaatctcatcactgggtgagtggcacaccgttcttacacaaacctggatagtgcagccagagtctatgtggtatgggctgtcacacacagggctctgcattgaccaaaacgtgtttctgtggagcctggctattcttttcccagcttgtatcaataactgaattttctaggatctcttctgcatcatgaatgcagttgtgatatgagcctcttctaaactttcaagcaaatgagttctgaattataagtagtaatggtagctacttatgcattgattgctatggttttctcagccctctaacttaaaatccctttagtcacctgtgagggaagagaaccacagaccagaggtaacaaatttagcaaaacataacaaaatctgcactgggccaaatgacaatcctctcacatgaaggctcacactggtgacattggtggtaccaggctcaccagaagacccctatttccattttgttcttgttccttccttggctgccctccctggctgacccagaagagcctcagtttgcattgtttacctcagctacaagcagcacctccccatgtagtgacaagcagcacaagagatgactgtcccctctccttccctccctcctttcctcagatttccttccaatgccatcatccaggtgtattactttctaaacctgtttctaacaaggatgaaaatctgtcatctgctcttacctttgtagcattccaagtcctcttaataatgcctaaaactgcatagtgctgagacagtgatggcgcccgcctttaatcccagcacttgtggtggggcagaggcaggcagatctctaggatttcaaggccagcctgttctacagagcaagttccaggacaaccaaggtttcatacacagataaactggggctgaataaaccaaaatactaaaaatttaaaaaaaaaaaagaggactgcaaagtgccaaaccctaggtgtaactgatgcattattttatagccatgataaagttcagtttataaattaagcatactgagaggttaatgaaataaagctaatatagcagtataatgtaatatgttatatggatgtggtactgtattcatcctttgttgtgtgacactttcctggagagacataaacatgtgcttaccccaaatggggaaccaatgacagacaaaaatataacactacaaaagtcgaatttggcaaatgaggttacttgcaggagtatgggtgaggggttacttacaggagcagggacaactcagaggaagctgcattatcaaaactcactccaggatgagtgacactcatgaaacctggaaccctggagccctctgtacaacttacaggtgggtaggcaggctggagagtcttatttcctcaacaggccttactgtttatatagctgaggagagggaaggaccttgtatgtctagtcaatttcagggacttcctgagacttctgagttgtttgctcctggattttattgattctcctttcaaacctcctgagttagtctcaaggagcttcccatggagatagaaaatgtcagtttggagtgaatttcttcttgagggtgttgcctatcattacccttccagataaatgttgtttgaacatgtgcactgtaaaaccaaccaactggataacaaaaccatctgtttatggacaagtacacgtcacaacaaagtggatatgctgcacagaatgggaccctgcagaatccttagtctagtaggtcaagtttataccgatcaatgtcatactcctccaggatcaaaaacaaattggtatgacatcacccctcacacaccagggagatgaagaaatcctttagaaacagccatagtttttgattacttgtgatgtcttagcacagccactgtgctgagagtttcaaacataccattccataaactctcacatgaattctgttgtttccccaggagtggcacagctagcagtgctcacatcataaacagaagtgagggttagagatgaacttccacagttactgctccctactagcctctgccaccttggaattgaacagttgtcatggctgttcctcatgtagttactattgcctgttcccaactctttcttagtggatctctgtaagtttgaggtcagcctggtctacacagtgagttccagcacagtcagggctatacattgagggaccttgtcaataataataataataataataataataataataataataaataataataatagtaataataattactagtagataaagtactttctacataaacaacagggcctgagtttgatccccagcacccacataaatgccaggtactgtgacacacacctataatcttggtactgaggagcagaaacaggagaatcctcagaaccctccagccagtcagtctagcaaaagtgatgaaccccagattcagaaatcaggtgaggaatgatggaggaaggctcccaatgtcactcatgatcttctacacatacatttacacatgtgcccaggagcacatacacatatactatactatatcccacacaaatcaaatacaatataaaaaatgaaacgtagccctagatctcttaaatgatagacaccaaaagctgttttctagagtcagacatggttttgaaatctctattaatagatatgtgtgtgtgcacatgcgtgcatgcatattaaagtattttctattgtaacgatctgacagagaggaaaatataatgacaatttgaggataaataggaaatcagacaaatgacaacattttagacaaattcaatagctttaaacaaaccaaattcccaagggagatgcctgcccctttcattttatttttctggaacattgttttcacaaccttccctcaatgagtcttgtgggttcattttgattgacaagagcagcatcctttccttttaatctgaatccctttgtcagcagcagcaatccatctgtaattggtctaattgcaatcttccttctttctgtaggggcttctatgcaaaagatggtgtttgtgaacactgtagctccccttgcagaacatgtgaaggcaatgctaccaactgtcactcttgtgaaggagacttcgtgctagaccatggggtgtgctgggaaacttgccctgaaaagcatgtggctgtggaaggagtctgtaagcactgtccagaaatgtgccaggactgcatccatgagaaaacttgcaaaggtacctggaagcttgctgatggaaaagaatattctttctcttgcacaaagaaacacatgaacaaaatgaaaggaatctgcccaggcaatttcttttcctaaaaagattgtgctatgaccaaactggtctagcaagcacaccaagtaggaaatctgataggtttttatcctaatgtaggaaaactatgtcctttccccattggctggggtcccacccaagtctttcacagttggctagttttaaaagaatttgtgggaaaaagtgaaagaagttgaacaagtggttagcctctctggaccatcaagtctgtggaatgtggaagaggcatggggcagctcttcataacccaaagctttactaggtggagaagataaaatgatttgaattcctttgcataaaagttttacagggtgagggggatctgtggaatattggcccttggtagactagtatctttgatagaaaaccaagaaaaagcattctcacaatcccaagggatcctggccctgaggagccactggctggagccactatctgagaaccaaaagaatcaatctccaccttcagtgaaattaacatctactggcctatcattggggaagtggagggtgcaatatactccttcccttgtggactctgtgaaataagacaagcaagtgttcttataaatatgctcgattctcacctcaaagggaataagcaacatttattctggggaaaacatgcatgaccatggactaggaacacaaattcaggttactctatatggcatgttccaatgtgacaggttcatgatgttttcctactcagagccaaaggaagtcatgaatcaaggctcttcaaaagcattagtggtaacagcgggtaggagggttacagcatggtgaggacatctctgctataggcttcacataccaccgatgacagtcatggctttggggttgttagatgttaatgagttgttcagtttacacattccagaggaatttacctgacagtcgcacacagaggtgggcaatggatggctgttaaggagctaaagaaagcctaagataatttgattatagatctacaacattgcaacattccacaacagcaaagtcctaatcagtcagccaggcttctagactcttcaacacagctgttgcatttttttctgagaattgtagttcatacataatattacccagggcactgatttacagataagatcctcaaaccccactctgagttcaaggtctcataggagagactgactctgtctcaaacataaaaacaaaagcacagaagtgattagagaaagagttataaagctgtgggagaaaggtggatggagcagaaggtaaaggcggccccacctttgaccccacatcatggaaagtgagagccaactcctgcaaattgacctctgacctccatacttgctccaatgtgggcacatcccacatacatacacatacatacaacatacaatataaatttaaagaataagtttagatgactttaaactgagggacaatgctatggattaaacagatctttggaacaagctcccaagaaaaggagtctagtcctatccgaaggtttcacttagtgtgatctacagcattttccaaacccatccctagtaagagaaggaacacaaaaagtggctagcagtgcattcttcatgttgattaaacatctgtccaaggatctagcctatcaaagaatgaaaaatcaacaaattcccaagcttcctgccttggaaatcaagtttgggggtccttgacacggtttcaaaaatttgtgactacttttcaatctatttgtcttttagaatttcatacattgattcatgtgtacttaccttcttatccctccttttcctgctccagcttctccagtgtcgtctcctattcactctcaagttcatgaactcttcttctagaattattatagactatatatatatatatatatatatatgataacactatacataatatttcatctataatacacatatacatatattctactgagccatttagtgtttttcttatgtacatgtgtttagggcagactacttgggattggatcatttatcaggggtgaaagccatatatgggtgggaccttgtgaaatttcccctgtccatttccccatgttggatggtgttgcagaatgtaggtcttgtttacacaaccattttgttgagatttcatgggtacagcttccctgtcacatctagaagacactttctagcagcagatatcctggtcctctggctcttataatctcacccctctttctcaatgttcttgagcctttggtacagaggttgtgttgtagatataccagttagggatgattgccccatgatcttttattctctgcattttgaccaattgtagatctgtacagtacctgatgcaaaatgaagcttctccaagaagtataatgagagctatgcttatctgtgagtgtagtctttagaatgtagttagaaagctgggcgtaatggtgcatgcctttaatcccagcatctgggaggcagaggtagaggcagatggatctctgtgagttcgaggccaccctgagctccatggtaaattccaagacaaccagatctacatagtgagaccttgtctcaagcaaataagcaaacaaacaaacaacataaaagaatgtagttagaaatcatattggtttaggacaatgacagtagcaggctgtgctctatggtctataacctctccagccacaagtagttggctgggtttaccataccagatataaattacttcctattgagcaggccttaagtccaattagacagctattgtctgtaggggacagtgtaagccaagcctgctagaagctggctacaggaaagcctgaccacacccattagggtgtggtcaaggtgaggtcaggatgatgagagatagggtttaaagggacagacaaggcacatgggagtcccttctctctggcctccctgccttgctgtcactggcacgctctggcttgtgtttggctggcgtttatctaataaaggatatcttaacctcactggttacaaagctcccacattaattggctatccccaagataataatgtcgctactgcacatggggctatcttgctgggctggtcattgttatggttcagctttctcctttggcaacttgcatttgaccttctgatactatgagagatagtcctcaaggaagagacttctagctcagtttcagatcatatcctccaggtcatgtttctaaaatacatggtatcttcagcaatagagtctaatcttcaatttctgggaggcaacaataacctatatggtaccgaggagtctcttagacagccctgaccaacaacttaaaaaggagcttcccttgcctgggatttttgttagtgcatggctcttgaggggaacattattttaattccattcaagctatactgacctgcatgcacacttgtatgtgtgcatatacgtgcacacacacacacacacacacacacacacacacacacacacacacacacaccaataaatagacagtaataggctcttgtattactttatgtgtgtgtgtgtggtgtctattaaagtaaagcttataaaatataacattttcctatggtttttccaaatacccttagtggtatatatctttcctcctactcctctctctctctctgaattatcttccctccctcccacaagttcagaccctcatccaagttttccccctcatagtacctgtgtccttttagatccttctccagagctctttctctcctataccgccatgactctttctaaccctcctggtttttgcagctcctttgggttacatactaaagtctaaagattcaggaaaaaagggcccacaaatacaaaagaaaatgcagtatttgtctttctggcctggtttatcttgctcagtataatagtttctggttctatgcatttacatgatttaatcacaaatttcatgatttgatttttatttgcatctcaataatattccagtgtgtctatgcatcacattttcattttctatttgttggacatctagaatctttccatgtcctagctattgtgactagagcagcagtgaacctcgttgagcaagaacctgtagtagagaaggatgttgagtcctttatgccagggagtggtatagctgcgtcatatagtagatctacttttcgttttttgagaattctccatcttgatttccatggaggctggaccagctttcaatcaccaacagtgagtgatgtttctcctttccccatgtcttcaccagcatttgttgtcagttgttttcttaatctcagatgacatctcacagtaatcttaatttgcatctccatgatggctaattatgttgaagattttaaaggtatttctttaaaatttttagttttgggaattcttttgggaattctgtgttcagatctatagcccattttcttagttgggtcatttgttttcttgaatttttttttaatcttttgagctcttagtatgttctagatattaatcctctgtcaaatgtacagctttccaagattcactcctactctgtaggcttctttcttgtgcaactgattgcttcctctggtatacagaagcattttaattttataagatcccacttgtgagttgttggccttaattcctgggcaaatgaagtcctattcagaaagtcttttcctgaacctacatattgtatagtactggcagttttcttctagaaattccagtgttctgatttcatactgaggctttgggtccttgtggagttcatttgtgtgcggggtgacaggtatggatctagtttcattcttctatatgtggacattcatttcccccagatctttgagaaatgcctccagcatccccaccggcactatttcccacagctctggaagtttttacacctgaaagatgcaggccacatcatagcacaagtccaagatcatagaacgactgtgtgtcgttgtcttcgttaggtttttattgccgtgaagagacaccatgaccacagcaactcttataaggaaaacatttaattgaggggagtcatttacagtttcaaaggttcagccaattattgtcatggcagggagcatggtgaggtggcatgcaagcagagctagtgctggagctgagaattctacatcttgactcagaggcaactgactgtaacactgagtgaagcttcagataaaaacctcaaagcccaagcccacagtgatacaatttcaatagaaagtgtgtgccggattaaaggtgtgccctccagcctcaaggtttggattataggtgtgtgacatccagcctcctccaacaagaccacacttcctccaacaaggccatgtctcctaatagagccactccctctgagtttatagggcccaaatatattcaaactaccacagtggccttctgtgccaggcttagattgttagatactggggatgcaccctggctggatggagagaggcaaatgttatcctaggccaagaggctcagagagcttagaaatgggctagcccactacaagagtgatgaattcttttcatggatccctggggataacctgccttttcctcctttcctcagagtgtatgcctaatttcttcctatacgatgacacatgctatgagtcctgtcccaagcacttctatcccgacttgcaccagtgtgtcccctgccatgaaaattgtttggagtgcaaaggccccaaggaggatgactgtaaggcctgtgctgatacttccaaggttctctacaaagggctgtgtttggatatgtgccctgagggaacgtacaaagatgaggcagatgatgaatgtaaaggtaaggatttccaggctgcatgaccgagcaaaggtggctgggaagcctgtctacacaaagcgtgctctagggccaccatagtacccagtcacagctctcaggacacccctacccttcccgcccaaggaagccaattttgaaagagttcttttttgttgttttcttttgttcgaagagggtttaaacagggtttctctgtgtcttagctatcctggagtttgctctgtagaccaggctggcttcaaactcacagaaatctgctggcctctgcctccccaatgctgggattaaagatgtgtgacaccatagccctggcaagagttcatttttaaaatgcatcattcataagctttgtgcatgtgaatctagctatttacagatcacaaggcctttctaatggcatgtgcccatccaaaaggattccccatgtaaaggtttccaagagccggtgagcttttaaagggtgctctaagttgatagtggaaaggccacatgctggtttgtgaccttgctcatagtgatgagcgaccatgtccccaaaaccctacaagtctccaggagaaaggaattcatttcctaaaaggctgtccctaccttaactgtctctcaccatcctctgcttggctgccatacctgcagattgcttcgagttctgccggagctgctcatcagcttggacctgcctggcctgtcaggaaggcctgacaatagtgaatgaggtctgcaaggcacccaaggagtgtgcggctgtcgagtactgggatgagggcactcacaggtgccagccgtgtcacaggaagtgttcccgctgctcagggcctgccgaggaccagtgctatacctgccccggagagacacttcttctcagtgagttgtaacatatgtccaaggccagccgtgctgttcctctctgtgtgagcctgcaggacatgatggctgatgcccagtggctgttaacttctttctgtcctttttaaatttttctttacatttctttaacatttttcaaacctacagaaaacagacaaggtgggatggtcaaaggaacacactacttcacacttcacacactactaactttcatcttccaccctccccgtgagcctgcctgtgctaagccacaatctacctttttccctgaaacactgaagggtaaactagacacacttcagtctctttcctgtgaacatttttgctctatgtttcctagcacagggacaatttcttacacaagacaggacattgtcagcactaataaatttgcattgacacaacgagcaatggctcagtggtttagaacacctattgctcttgcagaagactcaattcccagcacccaccatggctcacactcattgaaactccactgccaggggatccaatgccctcttctgacatctgtggattcaggcacacatgtggtacacatacagagaggcagataaaacattaatacacattaaataagtctaaatttttaaaaatatactgttaatattaaattgtcccagctgccctttaggacatggttcgggacaaggtctacatgcatttaacctttgtatcttggagcctccttgcccaaagagaggatgtgtgggagccacaggtcaggctttctgtcaaaacagactcttttccttcttcaacagacacgacgtgtgtgaaaagctgcccagaaggctaccacactgacaaggacagccaccgctgtgtgccctgccacagctcttgcaggacctgtgaaggatctcacagcatgcagtgccactcctgccgacctggctggttccaactgggcaaagagtgcttgctgcagtgcagggacgggtaaggaccttctcattctgcagctgctccagaaggcaatgaggaaagggggccactgtaaagccgccctgcgagtagggagcaaatatgagcgaggccacacaacacagggcaagaaaaggaagaaatagtgtgtctccatgagaaaacacactaagtcagatggtcccatcagaccaagtgactaaccatcctcagggcctggcctcactgataatccacagatacttgcagtcccactacagagcggttcctcctcccctcagaatgactacattaatgacccacatgcattaatagaggttcttttccttcagttttaggatatggtatggttctgcattaatgtgcaaaacctaagcagtacaggtgggacattgattgcacaaagggagcaatttcagttaccatctccatttacaccccatggactctgcaacctgccagccctccacaaatatccaacctccacaatctgcagctttggttctaaacgcaaccttgacgctgatatgaagtgctaatacaaagcagtttgtgaataagaacttgattatttttctgctaagaacaactgctggtgtgtatatcaggtctggttacaaacactctaagaagaaggcttgattgggccatgccctcctcagcatcccacaccccttcccactctttcccaattagtaacctggggccctgaggggttccagacccaaactgaaggaccgtccctggatgctttcaccccaattggtacctttcttcagccctaaatggtgtctgcatgtttcatttatttcagtgctgtatattggctcatgtttctgcaaatctcattcattcactcgtgtagtccacacaggtcagtgtaagagcacctggtatgcctggataagctgagttaaagcccatactttatacttcaaaggcttatccttgtcctggcatctcctcatcaaaaggaatttaagttcctggaagaaaaacaactcttgtttttcatgtgtgccaccacacacgaagcacagagtcaatgcctcagtgatttggggcaagtgctagccatgagcattaatggcgacacgccactgccagacaaggatcatgaagatacagacatgagccacacaacctctggagtccttcagaccttgatctgatctggaaggcatctgttcaccctcagcagatgcacagttgtgttatattggggttggcaaatgaggcttttcataccatctcctatttgatattaaataagttctcttaatgttctaagccatatatgttttgaatctgcaatctttgggatgacaatataagctcggaaggttttgcaggggatgctttagccagcccctaagcaggcatggctacagcatcccctacaatggtaatttcccacattaaggtatgccttgagaattaatttaaaaacccacaactaacacaaatatacacgattcatagagtcctagtcactagtataacagctttctagtgtttaattgtagtgctagtaataactccatgttacaaataaggaatatgaaacacagagatattgagtgacccacccaagggcacacagctcattacattaggtggtactgcttggatttgaaagcacacttgttccagagcctaagcttctaaccatcacattctggttcattttcatgttcaacgggatgaaatgtttctgaagtccctagggtatcatcaggtacacaatggagcttaatgagtggttgttactgctaacatgttgactctccaaaaatccttcccaagggatttacatctgttttataaaggccagcatcaatcatatggcctcatatttaaaaatgtttttaaattgagaaattagaagatccatccagaggtacactttaaattgccttttgagctgggtgtagtggcacatgcttgtagtcattgccagatcctgctacagcctgggttccggtcctgaggtagagaaggggcattggttcaaagaaatgaattatccaaccaccagatgagtttcacacaagtggccagccccgaatagctccagacatctttatttataaatcaaaaacaagattgttttccatacaaacaaacaagtttttcccattctccaatgttaaccttcagcaaaaacaaatatgttgaatatggtttttcccaacttttacatcaaaatgtctttaaaccaaaacaacacttaccattttgctagcttggcgaaatatcgagccaggtgcatcctgtctttacaaaactaaaaggtgattgacataggcacgtactttcaagaatagcaatctcattcaaaacatttttacagagataggtctgctctgctcccatcctgtcagcactgaatcagaacagttcctggggtctagagtgacagctggcaaccctagacaagaaacctgagaagcatcagctcccaaagaattttagggaaaattatttgagaaaaaaagggtttctaggaatgatcacatctgtctcatgtattatggacaaaatgacactaaaacaaacaagagaatcatcaatagtaagagagagaggagagcatgcaggcttcaagatcccagcagtactctacactgtcccaaagtccttgccaagtgagactgtctccatgggcttaagtgagactgtctccctgggcttttgcctcatctggagacccatcagacaagcactcatatactggtccaaaactaggccacacagctcccgacaagtcatagcatttgaaggcaagatatttgctacaaatttgaggccagcctggactacaacaggagttcaagtccagtctgactatacataggagattcagtctattcaaatgatgttggaggatggtgatgatgaagatgatgatgatgatgataatgatgaaaggaaaggaatgctcttccatccagggtgtggctcagcaaaggttaaagttaaatctggagccgtcaaaggaagaacaggcagtggcagtggtggcagagaactgttgagccacaaccgtgtgtgactttggccttatcataggtgcttccggctccatgttcacacacagccggggcctggggagggctataacactcagtgtacaggaaagagaacccacacttactggattcattagcattttggcaatgattccatgaggaaggtggagtgaagagaccgaagaggccaggcctgtgaataaaccctgtctgacacagcccttagttcaagcagagcccattcagccctccacatcctcggcttccacacttgattagggactggaaatattcaaaaacaatgcatctgttgctgaacacatagctttttacttgtcattatttctgagccagtatagcataacaaccattcccgtggcatttatcactgagtcactgagaaccatttagagataattgaaagcataaaggaggaggcagggttaatacagacaccgtgccgttttatacatgggacttgtacacacacagtgttagcatccaggcacaccttggccacgccccttgggggacctggcagagtgcatcacccctacacacatggtaggcagtacccgggctctgtacacaggtgcaaagggcccctttaggagacaagctctgcccactccagctctctttaccgctgcttctctgaagaggcagggaggggtttgcctctctccctttctctctctctttctctcttcccacatctctcctctctcctctccctttccctcctcccttcccttcccttccctcagtaaaattgacaaaagctcggtctgcatggtgtttgcccctcactagctgaggtccctctcttgccattttataacacatgccaatcctctcagagactgagtgtgtctgagatttgtatatctttgctcccctcctcatttcagatattatggagaaagcggtcgctgtgagaagtgtgacaagagctgcaaggcatgccggggcccacggcccacagactgccagtcctgcgataaatttttctttctcctgcgctccaagggacagtgtcaccgcacctgtccagaacactactttgcagaccaacacgcacagacctgtgagaggtgccacccaacttgtgacaaatgtgatggtgagaatatgcaaatgagatggaaatttgaggggtttttccttcctgtttattccctctctctccctcttaccttgttgcggggggggggggggggggggaggtgcccctatttcccaacttttcctcaggcttctccagcattagcacactctctctccactctccacttctgcagcatccttgctgccttccaaatttcctgtctatcaaggttgataatacagagatcattgctctattcctgctcccaacttccttctccacttgtatgatctcatcgctctgaataatccctgagaaaaacaacttaaggggagaagggcttgtctcagctagtgcctgcagaggcttcagtctccagtcagctggctgcacagctgaggaccaggcagaacaccttggtagcaggatcttgtcatatagcagagaagatcagctcccagcagacaggaagcagggatgagttaagggaagagaagcagacacacttccagggcaggccccaagcaccctccttcctccgactgaccccacgtcgcaccctctctctccctccttcatctgaccctacttcgtaccatctccctccttctgctatctgaccctactttgcaccatctccaaacaatgtcattagattgtgaatccatcacaagctccatccaccgatgaagtcaagatctaattggctccccagagtctgtcctgtggcaaacatgagcctgacgatggagacatttcatattcaaactgcaacatacatagcacttgtctagggaaagccattcgtgttcatcagtttagaaactccccaagacctctgcctcaagctctcccaagatccagaattgttttcctggtgaccgatggtgcccgagatcataaaatcaatgtcggtgggaccaccattcaaccactgcctggggcagcatattgacgctatccctgatattactctgccccttacttcctactgaacccacttacctacaacacagatgagtttcaagacctgtgggccctgtcctaagtatccctcacatcagatgtccttctggagtcttgctgtgctcattacatgcccaggatcccttcgcaggccttttgaagcagctggcaggtccctgtggccctctgttccctcctgcaggttatcctagcacagccattctgaaacttcagtgtgcccatttccaggaaagatggccacagtgaagctatgtaagagatggtagtgcacattcctgttccccttttcaaaacagccctgcctttctcagcccttctagatacatttctaacagttcttaggatattgattggcatcacattattttgtattatcctaagtttaacaaaataaggacattttgtgcaagtatataacgaacatactcctcttccatatgatgttatcacacctgggtagagatgcaggccaggtttaaacacatgtccttcaacacatgatgcctgtgccttatcctcttcagtatttcctaccagaatgcaccagcaagctcagcttccgtttttaaaggtcattgctgggggtgaggtggggggggtgtagaatagatttttatgggtggactgagggggatgggaataggagatgaaatgaggaggggtaaggaaatagggttgagggaggggttatggggaggaacatctgggaatgagggtcatttgagggatggcatgaaaacctaaagcagtggaaacctcctaaaatatataaaggccatcctaataacatttcctaataatgggggagatggagttccaacccacggaaatcctcaaacaacttgccaagacaatgagttgctaaccacaaactgatagctgggtcccactgctgaggacaacaccctcatgactcattgaacatggagaagttgagctgatgcctacatagaacctttacccctatgtcctaatatctttagtgtaggtaggtactccacaggctaccaaaagagaaatgtaaacaccaacccagtcacaaaacccttgatttacaatctgtcctgcctgcaagagatgctagggcaatgtggcccagaacttatggaagccaaccgatgtctgatttgacttaaggcccactacatgagacagaacccatatctgacactgcttgggtgaccaagaaccagatactagacgtcacagagacccaaagtaaagccaaacacaactattctttttttaaaaaaatgatgacagaaatctttccctattcagatcccctaattcaatcttaattcttattccacacattctagagtcaagacccacctacaactacacggaaccactaagcaaccgactaaaatgccactctctcacatgtccccctgtgacctagttcccctttctcaaaaacaaacccttggggactcagagacccagcttggacatcatcttagagagctagtcttggtcctcctggcaggcttctccctccatcccaattctgtagtttgacatttcgccaaagctttttatgtgacctttttccagtgctgaggcaagcatactacttaccacggagttagattcccagccttccattacactttaattaaatttgtccacctctccaactgtgagcccctccagcaagagcaaagattatcagggttgtatggcattcattgtgtagatctgctctttttaatataacacctgataaatgttccctgagtgttgagtaaggaaatgaatatataggaagtaaataattcctttttttcaaactggaaaatgttgtttctccagccttgcctctgagaaaaatgcagctgaagatagccttgaatttttgattgtcctgcatccatttcccaaatttctggaattacaggcatacaccagcatggccagtttatgaggtgatggggattgaacccagggctttgcatatactaagcaactactctgccagctcacctatgtcccctgtcacctggcagaatgcactcaggcagtctccctccatctggtctccccagggttccatgtttgcatagtctgcacaaaagtgcaaaggacccctttaaaagaaagagccccccacttatgcgctctttcccccctctcctttcctgctgttcccctagggcacacaggacttttcctgtctcccccttctcttctgtcttctccccgtgtctttatcactctttaccttattttctgacctctccctcaataaaactttcaatatgagtcacgtctacaggtctctgtttccccatctgcccgccatctatcacctgccccaagactgccatcctcgtggtcccagctcgggacccggaacctgctacctgtggtcccaacccattattctttattcctaactgccagccccattcttgttgtccttagctttgattaatctgtgtactgtaaaatgagttcatcctgagctcattttgaatgggagagttagatctgggttctctactcctctttctcttccttcatacttactttgtttgtttgtttgtttgtttatttgagacagtgtcactccatgtaatcctggctgtcctggaatttgctgtgtagaccaggctgcctccttacttcaattaagtaaaagtaaacctacctatctcagagttatattctcggccttacattacattttaattaaatatgtccctctttccaactgtgagtcccttcagcaagagcaaagattatctgggttatatggcattttggagccctgctcttactttaatacaacacttgataagaaaatgaacatacacaagaacattgaaaatggaaatgtacctgcaataagacagtattcataaataaaaattaattttaatggaagagacaaaaaaaaaaaaaacaaagcaaatgaacttacagaaagtagcatattggtggctgctgagtggttccgtgtagttataggaggttcttgactctagaatgtatgaaataagaattaaggctgaattaggggatctgaatagggaaagatgtccatcaccatttttaaaagactagttatgtttgattagtctttaaataataaaacctgttactcggtttactccacccatgtttccaccagaaactccatccagactaggatagtccatttttcctggagatgacattcttgatagtacagatcaaatcaacaaaccaattagctcagtgggggagaacttgtctgtgacagcagagtccctccctaacatttaagccctgagcctgggctttagttccagtctcttgtgaaacacttttagttcctgttatggtttttaaagaagatggagggaaaggaggaggaagaataaaggagaagaaagagagggggagggagagaagagaagagaagagaagagaagagaagagaagagaagagaagagaaggaaggaaggaaggaaggaaggaaggaaggaaggaaggaaagaaggaagatacatctgcccacttcttgcccaggcagggcaggcaagtgctttattccgacactgtgcagttgtgtttgctttctgggttgaagagacttcatctagatagtttagcctaaatctcttttgttgttttctctgctgtttgttttcccatctcagtatgcttagaatgtatcaagctatacaagaatttaaattcacatgtgagatttatttctaagacaaggtcccaatatatagctctggttggcctggaacatactatgtatatctggccttgaactcacagagatctgcctgcctctgcctcctgcatgtttagattgaaggtgtatatcaccatgctcagcaatgcatttttattttatgtgtacaggtgctttgccttcctgtatgctagtgtaccaagtgcatgcgatgcccacagaggccagaggaggcataagataccctggaaccagagttataggaggttgggaacagccaatggggtgctggaaatcaaacccccaccctctggaagaacagccactgttcttaactgctgggccatctctccagctctacatttaattttttcgtgtatatgtgtgactaagggttaaacattgtcttagaagattgtgtacttagctaggtggtggtggtacatgcctttaatcccagtacccaggagacacagaccagcccagtctacaagaggacagctagggctacacagagaaacgctgtctggaaaaaacaaaatacaagaagaagattgtgtactaaatttttgttcaacctcatactgctaactccaaagcctagagttctttagtactcttgggggccagaatccctacacctggttgaaaccagcaaagaccagtctgatctagttcaggggttttgtgtgtacatacacttatttgtttttctttcagtgtgtgtgtgtgtgtgtgtgtgtgtgtgtgtgtgtgtgtgtgtgtgtagaccatgcagattttgacctcacaaccttcctgccttagccttcctagtgctggaattataagtgattgtcaccatatttagccgttatcatcagtgtcatggtgcatatgcatctacttattcccaaatgcttttcttgactccattcccattcctacgcatgtcaaatttctgagtatctcacatgagatgtccaacagattccccaaacctctcattccatcctcagaccactttttcctgtatcttgatgaatggctccattatgttccccattgtctgacactggaacctagaattatccttttctctcattttttgattgtttgtttgtttttctttttttatgcaaactgcacaaggctttattatagttgtttaacgagctaacgccatgttagctcaggtctttcatccacccaccatggcggatggctaggaaagacagctcaaagcgtctacatagagatcttatagggcagtgtaaggggagtgtctaggggtatgcacagattggtgtgcctccaggcttggagggtttgccctgtgttgattggtcaactggttgttatagcccataggccctcccagggtggttgctttgctctgtgcgtcattgctgtgtgcttgtccgtaaagcacacccagagccgtatagcatagcaccaccagttaacttctgattagttccttgccacgaggcaggcttctaacctcctagtgactaagacaaagtcaggcaagcatgtgctaggctgttatggctgctgaaaaggggagctggtcccttcattcccccattttctcttttggaaattccaatcatggaattgctgtctctccagtgttcccatcagggagtgagagatattggcgtcccccatgtaagggagtttcttctgacttagcatttcaaccagggaaaatgggcgacatattttttcccatgctacttcctgctgactttgggatgaagttagggacccaataaggctgaaatgctagtcaaaagcaaaaaaaggaatttaggcaatggggatttcatcaggagcttctggttggcagactctgttgcagagacagggggtgtccatatcagcgggactggttcacatccacagcaagtccagggttcacaatctacttaggaacagcctatagtcagcaactgatatactcagatgtatctgccagaagcagaaacctgtttaggatatgtttaaactaggaacagaagttaaaacttatttactgaagcccacagtgcagaaaaagcagatatctggatctgttcaaacagcaggaacatatttgtaattttgagtcctagcaataactacagatttgggctagaagcatgtacattttttcttctgtccagagagccaggtatgggttggacagaggtgcctttgacctgatgaaaagtcctttaagtttatacctatatgacaaccaaaataaacctaaaaaccttgagcttgtgcctgagcagtagatagtcattactttatcagctaacatactgactatagtctatagtggatatgactgtctgatgctgtcaagctgacaaccattaatatttcagagatgtgagaagggtatattttatccgaatctactaaaaagtgacagaagccagttagaagccagtccatatacagttagccatatccaagtctctccattagcgctggaggcagatgtctcaaagaacagcaatcttcgccaggcctataaggtgagagggttttttttctctctctgtggaagagggacatggaaaagactgaccttgttttgtctaggcaaagggggtgcaatcaattttccagtgtccagcagctttgtccacagtcttggccaggtcctggcaggcagcaggtatcacatctgagcatctcactcactggtccaggtgcaggaactagggtgcctcataatcttctttggagactttgggtcactgtcaggatctggcagtctgtctggtattataaacttttaagataacattttaaatgacatattctgcaggtctggagcattagaggtttgcctgtttagttacttgacttaatcacacattaagcacacaggtggctaggtaaggtcttatttttgtaattcattaattcaatctgactataaccagttttaacttagtaaaatatttcaaacttagcacagctgaatttaaaactgcatagagttaccttatattccttaaacagtagctacatgtacgcattttacctgcttgcttatacttaacttctttctgagacagggtttctctgtgactttgaagcctgtcctggaattcgctctgctgaccaggctggccttgaactcacaaagatccacctgcctctgcctcccaaatgctgggattaaaggcatatgccatcaacgccctaaacttaacttctgaaaacataaactgtaacatcttataatagattagcagcttttattaaacaagaactttacattgtcaggctttgcttaaaaatgattctaaattgaagctctttaagaataaatattaataaaaaagacattttaaaaaacataaacatttaaaaaactggttttaaaaagaaatttaaattcccttaatgtctttctataatatatagaagcatcaacattttatatcttaactgaaaaacttgtttctaagatggtacctctaatttccatgggtcatctttagtcaagatggtggtttaagtatcctttttttaacttcaacaaaatggctaccagtcttttgtgccatgtggctggctacaaaatggtggtgacctgcaccatttgttttagcttgtttattcttgtaacagaacttaggttatgccaggaaacagatagaacattttaaaacaagcatacataatttacttgagaaataaacagaactttttaaatcagaattaacctaatgtggtcaaatttttaatttatattaccaatttttaaaatttattatttgtagacattagaaaccataacagtttatattttttctctgacttttaacaaccttttctctgaccttttacgacttgctttaaccctttataactttctatatacctttggtttattcctctgattttttagacattcttagacaaatttctctttcccttcccctctttattactttagtctcctacattctctctcatttctcagtcaacataaaaactcttatcaaagtcccctttatagtttttaataactttaagtccatttctttagaacgtcctgatcaggccagatagttcatctgccccagctccatgtgctcagggcagagacctgggggggtggggggtgctggtaatcccagaccctctgccaaggcaggggtgggaaaaagacccggtggtctccctgcatgccatgtgtgtggagcacagagaaggcggggcagccaggcagatggtggccttgcagccatgtgctcagggcagggaaactcccgccacaagccaggacccacggcaggattgctgttgtgacagagacagctccactttgcatgcctcacagaccggcaggtgaggatagaaaaacagactcatctgcaccggccaggctcagctgtgagggccacagcaatggttggagttcagagcagcggcctcaggggactccgccgcagaacactgtaacctgtggcccatggcagaggaactcctatcctgaacaccacgtgctcagggcaagaaaagacccctgacccatgcatgccacatgcgtggcagtagggacagaaaaagatgctttacaaacacatagcacaaatgtgaaacttggacagacagcacagtaacacagagtaggatcctattcagaatttcagatggctagccccatggagatcaacttggtccaaaaccaagtctcccctacagattggcaacccgcctgggtctccttacagatggagcaggcaacttgctcctaccaagtcccactcctacagactgcggaagctgtcacccgaacctctgccctaaacaattctgtaggcctaaatacagatgtcgctagtgaccctaatacaggacctttatacttacaaaattaacagaaacagtagacctgaaaacacaaaactgatatatcactgaaaagcatgcaggcagggtgtggattgcaacagatcagataacatagataacaaacctgctgctcaactgcccagtcacccagcctgttccaaccctccaggctttacagaaaccatacagaaacaaagactggaaaagaaagttacctagtgtggcgccacgtgactcaacaaaagggggtgccataactttaactgactaaatatggtccttaacgttcatccagtggtcaaaagtcagaccgaggtgggggggggtggttacagtgggtcccatcatcaaagtcacaaataaaacaaaacagaaacccaagacacacagacaaaaataacaaatgtctatctccacctagacagacaaaaccactccagaaatacagacggccgggagggcgtataacttcaccaatccaagagaactactgtaccctcaccggctcccagacaggaatctcccaagtgtccctgaggttcccccagacttcctggatggcagtcggtgatcccctatcacctctgctgatcacactctgtctcctcctgagaccagagctcttgtctcttcccaagacacgagcgactgcaaagcacagaaccagatttcagccggcacaaacacacaaagacacagacaatacagggtacccgcttacctccaagatcgactccactcaggtgaggggtggccgcaaatccaggacgagcccccaaatgtaagacccccggaagctcaggcctccaggatctcagcccaggacctcggtcaccccaatcaccaggcagattggaaagcttgatgcaaactgcacaaggctttattgttgcttaacaaactaaccccatgttagctcaggtctttcatccacccgccatggcggatagctaggaaagacctgtttgttttacaagacagggtttctctgtgtagcttttgattctgtcctggaactcactccatagactacactagcctcgaattcacagaggtttacctgcctctgcctcctgagtgctgggttcaaaggcatgcactcccgtcgctggctccttttctcttcttgatctctcagtctccacggtttgtctctaactcctgtgacatctaagtatctcccaacttcatctccctgctcttaggcattagtgtcattatcttggttttgggatctcacagtttgtggcttgaattaccagttagtaccagttggctaagtggtcttgctgtctgcaggaatgagccacctcgtgggcatccagtcctccatgctgtctgattgatcttgcacagcagatacagccctgtctactgttcgatatttgcatatgaggctcctcccccacggccattcctcactttctccctcatctctcactaccagttcctccatcttcaaatccaagcacagtgacttactataaatctgaaccaatcttgcctcctgcctctctccagaaaactcctttagcctgctctgccaggactgctttcttctccattaccctcagtatgtttttttcaaaagcctttcccagcctcccatccggtgttcccctacagttctgtgtatccattcatctatttatttactcaacaaatacttattcagctctgtggcccagacaatgtccatacaattatgaacaaagcagaccaggtccctggaagccaggtcagtttacctggtgtaatttttgttcttagttttgtttttggaaactgttgctatgataaaatatatcctggccatcgcgcccaaaaaaatttaaggggaggaagagttgatttgagctcacaattccagataacagttcatcatcatagcagagaagtcaaaaaagcaagaacttaaaacacctagtcacacccacacataagtgtgataaaagtgagatgtcaactaatgactgtattgtcatttgctaagccagacagccctagtttctacccattagtgttgtgcagtgggccaacggaggatagttggtttctaattaagaccaggcaaccctcattaggtaagttaatgtctcttaacagaggccagtcaaagccgagcaccagccaaagctgaaaatttgtgtgtggattggagatatcatttacgatgtcagaggacagtctaagaactctacatttctccactggcctggagattctctgcaaaattaaggatggcagctttgagcatttcctgcccaagttcatcaaacaggatccccaagacaggattcaggagtgactggtggtactggttggatctggaggaagcccataagttggattcacctttgttttcctgcttggggcttgggccctggaactcacacagctatcattttcttctgctcttggcattcactgttcatctcctctgctgccctttcctcacgtagcacacacatcctttgctagtcagtgactcctgtgtgaactccagttttgtaacacagagattaggaaatctggggatccccaccttaggctataaactgaatagaaaaaaaagtgtaaatttttctgaaacattaactgtcatactataaaagcgaggatgtaggggaaaaaatccagaaaagtttggcagtctaaatcagcagtgtgcctgtgtttcatccactttcgattgtctaataattctagttgttaaaaagaaaactgtctgatgagcacggtggcacgcactcctaagcccagcacttagaaagaggcctgagacaggaggattatggaagtttgaagtcagcatgggctactcagtgacaccctgttgggaaaaaggaagaagggtggaaacagaagggaggaaggtggggaggaagagaagaataacctgaagctctgggagtcagggggaggggcgcatcacacacttacctgatctataccattgccattgcgtacagctggtgcctccagagttcctttgtcccttaacatgtttacttcctaatttatttattgccctcatacggtggtgagccccgaactttctcaagcagcctctccatgcgcagcacctcttgaagacacacaccccagggccatcctgcaggagctgagtttgtggcactggctaggggagaggttggtgagaggaaaagcagatggtgagctgttctgaattttaaggagatgtcaaaaggtctgtctttccaggctcgaggctccttagaaacagtaacaggcacaggctcttagtcttgggaagatagatagacagacagacagacagacagacagacagacagacagacagacagacaggaaaccatcaggaaattaaccctttgtgaaagatcccgagtgcctcggtgtgcagggcttacaatacagcaaagcagcacatgtcataaggcactgattcccaccaaggctgacacacacaccactcaatactgccttgggtctggacttcagccaaattgggaagagagcagtcacacagggagaggtctggtagcctgctgcccagcagagaggctacatacataataatgccaaagggtgggggcgtggatcctcaaggaaacttgcagtgtttgatgtgataggaggaggagtaaaggcattgtaaatgttccttttccagtactggaaatggagcccagggcttgccttgtgcaagctgcatgctgggtctaccacaagctacagcctggcccctagggtttccgaagcatcccatgagatttcccattttctgaggtcttttgcaaaacacacaatgttttgctttcaaattctcagtgaacggactgagagtcccgttcgtggaaaggactgagcaatctgtaagtcttgactttgtcttggagaccgaaacactcctgaagcctaacgttctcctattattgtaccaagcccatctcagagggcagggcccagcaaaagttttcctcagtcaccttttggcttcaatttacttgacattttccttactcctgagtgttccaacatcaagacagaggttagaatctgaaatctgtctcataacatgattctttgttcctctctctctttcaggaaaggaggcatggaattgcttgtcctgtgtgtggagctaccaccttcagagaggaatttgtgccccggaatgtcttgtaggggaatacagagatagagaggtactgagacctttggttggtgtaagcacccccgcccccaaccttaaggagctcaattcctacatgtcattctgggaagtgaaaacagactaaattcttacacgcaccacagcctaggtttaacactgtaccatgtctttcattcataaactagtcaagctaccaacccgaagcttcctcttgattcacaggaactgaatggatctaagatgacttgagccctggagtagttctgtgtgaccacaggaagctcagtcctccagtacagcagaaatactaactgttctctttccagactgtctgaacagactcctgacacaggagggagcttgctggcccagctctttcctttcctccagggcaggataacagcctttccctggagccacagacttcccaaacctcttcacttcttgattgtgtgattctagactagaaaccataagaaaatgcatcaatggtgaaattaaaacaaatcagcagatttacaagtaagctctctttgaattctgatatcagaattctagttcacagaggcaggctcagagaaattaaataatttattaactaccacatggataggaagtaacacagggagaagtacactctgaagatttgacaatatcagctgaaaacatgctatcagcatctaagatgctccaaaatgcctcaagaaatacaatttccattccttcttttcttttcttcgtatggatttattttcagtggtgcctaacatttgctccaccactgagcagtcaacctttctgtttctcctcctcctcttccattgcactgaaattacagatgcacaaaaagaaggtgtcttccgggccagtgagatggcttaacaggtaaaaatgcttgttgtacatgcaacttgagtgcagtcctcagatcccatggtggaaggagagaaccaactcctaaaagttgtcctccaacccccacatgcatgcctgttatatatgcatccgtacacacacacaatattaataatagtaataataataataataacaataatgataatttttaaaataaggtgtcttccccaaacccatatttctagcaccaggcaaggagatagatgttgccttggactttgaattctgactctgggcataagaatccaggcaagcagggaattcatattaaagagtaaaagccaaagaaaaccatagcactaacttggtggaaagtggaaacctaatcgcaacattcgggaggctgagactcaaagcaggaggactgtgagtttgaagccaacccaggctacataacaacaagaagaaaagaagtgcatgtacacacaaaagtaaaaagaatagaaattgatggtgccacctatgtgtacagagtacaaaacgctaggaattgcatcaaattggagaacagtaagaaggggttgctaccattctactctgctcctgacattgccacgtgagggtgatggcttcagctttaacagaggtagattttgagaaggaattagaaactaacatctagattattgcttttgcaatgtggagtgctgtggaaatgtctagactgcataggtatggcaaagttcagacacaagttgtccttgactcccactgtctttgaggcaggagcttgttacattatactgtaacactcctgaagcctaacgttctcctgttattgtaccaagcccatctcagagggcagggcccagcaaaagttttcctccagttgtacacttttggtttggcctttttcccagataatatggagtagaacaatgggctggagagatggctcagcagttaagagcactagctgctcttcctggggacccaggttcaatccccagcacccacatggcaactcacaactgtctgtaactccagttccagaggatctgacaccctcacacaacacacatgcaggcaaaactccattgcacatttttttaaatggagtagaccaccacacacatacactcacattgttccctattcatatgacaagagggacgagttattggagaactccggttccagattactacctgtgctctcaaaaataacctctttactattctcaatagggagaaaagtttaactgtaaaaaatgccacgagagttgcgtggagtgcaagggacccggagccaagaactgcaccgtgtgcccagatggcctgctactacacatggatgagggtcgctgcctccactgctgcaacgcttcccacccccagagatcccaggactgctgtgactgccagagtaccacaggtgagggcatgggatgacctcagaaagctgatgggagctacgtgggtggagtatggatggttcatgaagtgcctgctgtttgcctactatacttgaaacctcctggttcacaagttgtgtttgttttttctttgctgtgacaaaatgcctaaggaaaagtatttaaaggggagtttcagagatctgagtctgttgtttctaggcaacggtaagccttagcatcacggcagaaagcatgtggtagagcatcacaactcacctcatgacagtcaggaagcagagaagttcttgaaaatatatctttccagggcatgtcccaaggaacctatttcctccacctaaaacccaacacctcaaaataatggcatccattattttcattcattatatattcattatattcattaacggatgcatccattgactaggtcaaccccttaggacctgtcactcacccgaaagctcatgagctggcagccaagccccaagtctttggggaaatatctcaggttcaaactttaatcaaacagaccccatctatcatcaaagacacataggcccaaaggttggactagcatgctcaagtccacagcaataataagagaggtcgtctagagcaggcttggtgctgtgtccatgagcctgagtgcttaggagacagaagaagggagggtgggattcagggccactcttagcaaaacagaaagcttgaggtcctctggggctacctcagctttttgatactggacttcatctttttaaaaacataatacattcatacacatacacttgcacatcccagatactcatctggaatttgagcacaggcctgttggactgcaaagccccggagccccacattctttctacaactatgctgcccccagcttaactaagtctagaatctgacctttataaatgtattttgttcctttttatctttgctcctgagggaaaggggcaaggaattggttatcttggtaatactgaagaatcattctaatctaactcaaatcaagccattttgttagagcgttttagaaatggactttcactgaaagctaagaataagttcaacaactttaccaattccatgtcttcaattgtcctccagcctcaagcccaactgtgtatattaaaacttagaaagatcctaggacctggagatggctcagggcttaagaacttcaacatggctgctcaaaatgtgtggaactccagtttctagtgccctcttctggtctaccgaggcaccagacacacatggagtgtacatatatgcatacaggcaaaacacttatacatgcacgtgccaggcaagaattttaccactgaaccaccaatacatacccctcatacacataaaaataaaaatgagtacatcttcagaaaaaaaaaacttgaagattgtgaatggagtgatcccttctaagtgaaaagcacattgttaaaatatattttctcctctggaaatagagtttccttgggattcagatgtgtcatccctgaccaaaaccagtgtatgttatgtttgttgtttgtaagtaaagaaaatccaaaacccaaaactgataccagctgtttattgttttgtttgtttgtttgtttcagactttcaattagtttccaggtttcacctttccaagaactttcctttctcagcttttacccaccaagagcagctggtttgccagacccttatctgcacccccctcagggtctgaagctgggctgacagctgagagcaagagccctgttacatcaatgttcttaaatgaaaacagaagcatgagcctcttgggtgcagtttctgaaatgtcagttccaagaaataatttgatagttttcctggttcctaagaggctctgaaagagttatctggggcaaaccctaccaaaaaaaaaaaaatcctcttgggctaaggatacagttccgtgatggaaagttacagaagtatgtgtatggggagaaataacgaacccagatattcaagcttacttgagtctttgcttctgagacagctttcccctcaagaaaaaccaaatggtagaggctgaccctgacccaacacctaagactaagaactgtaagacctgagtgcattcagcactctgaaaagaaaacaacctccaaaggtccattgaacattctcctgcctcaggagctgtgagccatggacagattacttatctgtccttctagtgtgttcatatttcctccagggggaaagtctgtgctgacactggtaatgttgaatacaataatgataatactgttactttagaggaaacattttttttttgctagatgggcaaaattctgttagaataaaatagaagttaagcatcagcaaaataaaagtgtgtgtgaagtgtgtgtgtgtgtgcaggggttactcagttgcaggagtgcttgcaaggtccttgtggaggggtagaagaacacgaaagaggggcagggaaggggaggggaggaagagcctactttgtattaaaaatttgtacatccaactgggcagatacctattcctctggctgttttatactttttgccttactgtatggtaggttaaaaagaaaaggtaataaaagtagttaagcaactcaaatcatactgcctgaatgaatgaaaataaaatgagaaaaatcaactaaatgctcaagctatgccatacactgttttggtgctgcaacatcctcagggaagccctgaaaaaagaggcttataaataagaaagggaagggccctgaaattcaataatttcaattacactataaatcccttgctaatggcagtcaggattttaagatgataaagcatgccttttcttgctcagggaatgccatggctattcaaggaaaccaaacatgtggtcagagaatttgcctccagaatcccacctagagttgaggctaatggattggaaagtctacttgttacacaaaatagttcttgtctatgacaagcaagtcggcccaaataatttccaaggccacacatgactaagagtcagtaggctttataaaagtatgcttcattggtcttgaagggtggcaccagtctaaaaaacagttaaagagacatctccatcttttaaaaaaaaaattcagagttcttgtttagaagtagacacaccacacacacatacacacacacacacacacacacacacacacacacacacacacacacacacacatctcagaaatggaaaaatcactgagaatgttggacccttagagactggcccatgagatagggatctggggtccctttggaatcttaaattgaccattctaggagcatcagttggttttattaaatatagattgggactcttgtgggccagatactgagttttgtaaagtggtatacctcctaagaaaacgaaaaaaaaaaaaaaaaaaaaaaccactgattctaccattttaggtttagaaaagaaatggaggggcagttctttacttcagaatctgattttcccatttctgtttcctcttttctctcttgctgctgcctctggggtggcctggtatcagaggagtgcatccttccagtcagcgagaccgtgccctcggagcgcaccaagaccgccctgctggtgacctcgggtgccatgctgctgctgctgctgggggccgctgtggtcgtgtggcggaagtctcgaagccgacctgtggcaaaggggcgctacgaaaagttggcggaacccaccgtgtcatactcctcctacaggagcagctatcttgaggaggaccaggtgatcgagtacagggaccgagactatgatgaagatgatgaggatgacatcgtctacatgagccaagatggcactgtctaccggaagttcaagtacgggctgctggaggaggcagaagatgatgagttggagtacgatgatgagagctactccttccagtaaacagagcctgccttgtagtccccatggctctcagccttgcctggggctaccatcgcattggctgaggttcgagtgtgtgtgctttgtcctaactttgtttccaacctaaatatgtagggatgctggagtctgctgtgctgctcttgactagctgagtgcaatgaacagatcctgaaaagcgagaattcaaaggcattttcctcgagggttcgtcaagactttaaacgcaggaagtggaagtggaagatctgttgaacactctaacatgatttctaaagtggacggaacagaggacctgtaaggattctgctggagacccctgcttccttctggaattctgatagttgacccactagtggagagatgtagtggagagtaccagagagttgttggggctggggtgggaggactctcccctttcaattgtgtttaagaagaaaatctgtaaagagcgcgaaaaggggcttgttgtttctttcacagtacttctggggagccgaaaggccatctctcctgtgaatgctcaggacccatctaaaacgaaggattagcggcctcaaggctgacagagcgcatgctcactgggccctggctcctttgcaaagaccagaataaggatcctgggcagaggaagcttaggtggaggacagcatcaagtcacaaggaaagagctcgtgtccaagcatcgcaccctcgtgattctctaagagcctttttgataggaaatgataaaagaaaaattgtaatggtaccctaacacaaaatacaaagatttagctgcttaatcagagcaaagctttcaccaatgagtcacccaagaagctcggactctccataagaaaaggagggatagagtctaccatttaaaaatttcccaacatcttgctcaccggctgcaaacagctgcccggctctcttcaatcctgtgacttcttgtttctgggcttcctaaactctttttccacgctggtcaagggtgttcgtagattatgcattcatgggcacgttttgcagatgctaattcacagggagggtgccagatgcaaaagggcacgagcagagcctcatggagcagctccttgttacaggcaatgctatgtgcagactaccaaaaagtgagtggccccatcagatgatgataaatgaattgcacacttaccacatgccatgcaccaatctaactaatgtatctcccccactttgtacttgagaactctaccagatggtgccagccatcccttatttttaaaggaaatctgaggcttccaaaaaagctaaactcaaggtcacagacagctgatcaaggaataagaatgaccttaaagcatatattcttaataactgtgctccactgtgaaaacaagcattctaaacataataaaactatgtctgttattttattctatgatggttatcctacatactctagtaacatgtgaatgtaaatgacaaacttcatttctaggaaatccctgtgcttgtgtttttttagagaaaagccctcagaacatagaccactaaatagtctctgtcaacagccaggttttttccccaggcttttttaccaaaaaaaaaaaaaaaaaaaaaaaaaaaaaaaaaaaaaggctctattgggagtgtgcaaactaccatgggagcgtgcatggaatcagttcaaaattaatgagtaagctgtggctccagggaaactgtatttagggacacttaatatctgaatttcagaccattgtgacatatcatgaagtaacaccctttgcatggccacttaaaaacacatgagatctctgtaagtccagcaacaggtggcttcaaactcttcagacaccatgggtatcatataaacatcggatcaagttcccaaatttttgatcatttaaaattatctcttcaaagtccatttgactgttcacttttcaatccttaaaatagctttgaagaatcgccatcctatcctatcagtgagagaattcaacatttcttgctgtgtaatcccagagttcaactacagaagcaagtaattttgattgtaggtgtcattcatcttccttaagaatgtagaaacaaactgagctgctctcagaagcctagaaaaaattcccaagaaaagtatctgtgcttatgatgatgcactctcttctaagatgacttgagacactcagaaaaatggtggtgttccgctctgtgatccataaagaaaggaatcttatgcgtgtgtgtggttaagacctacctagccttgtgtttgtagtcttctcaagcttcctttggattctgtgctaacaactgccttcacagataaatatgtggttgaaaaacaactttggttttctgcttgcagaaagaaatgttaagactggaaatacaccaggagactcagtaaaagcccagaagattctggctccctgaaaggaattttaattggaaacaaagtgaaatcaagaacagataatgtcacagagacttgcttatgaccaaagtgtttctgggcatttgatgcatgtagtattatgctgtgtaccaaataatagatacaaaacagtaggcattctgggatgtgtctgtttcaatccatctctacccaaagctgaacaagtaagtttcatctccaataagtcagtccagtccatctttcaactccattaccactgccctgtcctattatggctaaatttcaatatctattttttccctcactcaagctagcaaaagccatttccaggtagaatgctgatgtgggctgtaatctcagcactcaggaaactgaaacagagaaatagagtatcagacaggtagatgaaccccaggagatggcacaggataaaagctcttgtgcaggcctgagaacggtagatggagaaaaccacctcctggaaagtcgtatctgaccaacacgtgcacaccatggcacacacataatcataaaacagtgttctaaagccagtcatagtggctcacacttgtaattccagtgcttgggatggtggggcaggaggactgccttaagagtgaagacagcttgggctacagtgtttcagggaagtctgaacagtgcagactggacctcagcaagtcaaaccaatcacttccagggttactcagaaggtctcgtgtagactgcccatctctcctaattattgtgaatgacattcagcctcttaagacttttcacccacagtgtcctggtccctccctgtttcccagattccccatctatactctcaaggcaccaaattgcttttaggctcttgcaatcccacgctgtttctcatgtcctccagcacgtgttgttcacccctttggaatctgccttgccagccttgaccagaaggaaaattcctgaccatcctttaaaattgtgtttccttgtcacccatcctgggaggtcttctttggttaccttctcatccttcttttatgcagacaatctgtacatacagttacttcatgccacctggtaatcctctctgcttgcctggatgtactcaaaatatgggattctttcaggcaactacttcccagaatctatagtacatggtgcccagaactggggtggggtggaggacttatagtcaagcatagtggctcacagtttaatcccagtactcagggggctgaggcaggaggatcgccatgagtttgagaggctaagctgagtaatgtagtaaattcctggccagcatagactacagatgagatgctatttaaaaaataagaacaaacgaacaaacaaaaaactcccaacaatgtaaagaagttgttagtgtaaaacctagttcttattccaaaaggaataagaagtaattttatcaggaccaaatatgagtgaccatggcccagagatatggatttacattccctggaatgatgtgtcctgacagaagtggttatatgcacttttatagtcagaaaatcaaaagtaagcataagctaaaatgcatttccccgatatggcagtaaggatatcaggcagggaggttacagcaaagtggagaaactgtttcagaagctatctgatgacatggttagcttgtgaactggtgaaagctagccgtctgctgcaaaatccgaaggtcttatctgatagtcaaaaggaatgctaggtcagctacagaggttggtgagaagtgactgttaaaggactaaagtccaaggtgtaagttgggctctcagtccacatcattacaacccttcctagacaggaagtgttaatcagtctgtacaatcttcaacatagccacttttttcagggcacattaatttcttaaactgattgttttcattttggttagtgcacatgtgtcttcccatctgtgtatgcaccacctgtgtgcagggcctcagaagccagaaggggttgacaaatcccctggagcctgagctgcaggcaattcactgaccatgggacctccacaagagccggaagtgctcttgaccactgagccatttctccagctcctattttgtttggttttgagacaggttccaactatgtatgtagatcaggctgggtgcaacctcatgatccatgcccaagctcatctgtgctcaagcttagaactgagttttatgaagacaagatttgcagggtgtggcagtacacacctataatcctagcgctcaggagcctgcagcagaattaggagcaaaagaaaacaaaagcatccatgagaagttttacagtaatgctgtaaaaaaacaaaaagtggggtggggaggatatctgaagaattataaatttccaaatgtgaggtggagagatgactgagatgttaggagcatgtgcagctcttgcagaggatttgagtttggttaccagcactgtggctcacaaccacctctgacctccaattccaaaggatctgatgcctcacacctgacctggaagctgcactcacaggaacaaagctaagtgcacacacgaaattaaaaataatattttccaaatgtgaagtcagaagttatatcccatagggataagtatctgctgttaggaataagggaagctggagactgaatgctttcaaaacacacttgtaacatactcagagtcctggcctattttaagtccacacaaaaaagaaacttcttcagtgtactacctacaggaccaaatttatatgtcaccagtttaattaaatcgtatggtttgctttacatttagaacataagtagactatgtttgagaaggaaatacaagaatcccattgatgcatgcttgatgtaactaggtcttatttgatcaccaaacatcaataggacaagacaatttcccaaggtgctctgggaatgaatgaataagaggaaaatctgagaattcggccggggttttgcttttccacccagtgatgtgtccttgccctgttttaaaacacaggtagcaaagaaaaagagccaaatcatgttgatttcatgaaactggctcctcacagacaggggttgggtctgcttcattcatgcccacaactctgggattacaggaggccacttataaccatcaactctttgcatcttgaaagaaattaggaagcaatttgataaatggaaatggatttatttacagtttggctaaacctaggagaaatgagttccggtttctctttctagagcaggcttacagttttatggaaactatgggacaaaagccaagaataaacacattactgagttttcagagctgtgtccagtctctgtctgagaattcctcctctggctggcatcaagtcttcagcttttcccttcacctggtgtgggatcctatggaaatcttgattcttttggatccatccattgtccaatagctttagagtggaagggagagagaggcacaagttctccctagcacatcttccctccttccacatcacatagaacacgtacaaacttttacagtacttactgcgtatatgcagaaaatctgtagaagtcagagaacaatttacaggagtccggtttctccttaaaccatgtgggttctgaggctccaacttaggtcatcaaggcttggtacaagtgcttttacctcctaaatcacctctctgaccccaacacacacaaactttggttgagtggttacaggaatgagaattagtaactctagggcagtgtttctcaacctgtgggtcaagaccccatctcagatatttacattaggattcctggtgatagcaaaattacagctacaaagttgcagtgagatagttttatggttgtcgatcaccataatgtgagacactgtattaaagggtcgcagcatgaggaaggtagagaaccaaactgttctaggacttggtcatctggccattcctaactgctagagaggctaggagacaaacatcttaagaaggcaatatttagctgttggctttatgaacatgtgactccgctcccagggccttgtctccctcagtaaaattgttcttgtcaacacacacacacacacacacacacacacacacacacacacacacacacaccccacacacacaccacagctctcacatggaaaggaataagatatagtttattctagatccaaatataagtgaccatggcctcaaaataaagattcccccaaattccatgttccaacatggtgaccattccatgactttttatggtaacaaaatgtaaatgaaacaatttagaaatacttcaatagaaacctccagtgggcaggatgcagcagagaaaaatctctgccataggtctcagatgttatctagtaagaggcttttcagctggcaggactgacactagggcatctatttttacataggatttaaccaatagtcacatcagtggtgtggaacaaagacacagctccactctgtcaccttcagcaacatagagatttcccttagtcttttgaagaccttgattcagaccaaaccaggatttgtgtcttcaatatagaaaaaaataatttcagaactagccatatgacacagggctggagatgttattaaagataatttaacacagactttaagtctgagagaaaggagacagagaggcattctgacagaaaagacacacccacacctggctacgtgcttctgagaggaaaggaacaaaatacaaggcatacccaagtgtggtcatggactcctcaaaggagactcacaactgtttcagcaccagccatggagaccattttggtgactcttaagtgacaagtcaaaaagttctgaggagcccccatctcacaccaccccattgccttttgataaatgaaatgagtgaggtggtcccagagattcctggatggaaatgtctgagaagataaaatcatctgccactaaggttgacaagggtttagggtttagggcccatcctttacctgatactatttctagaagtttgtaggtttatagctgggaagaaagaaggtcttaaacagtaattgtgctgggtcagggatgcagttccttctcgtgtgcctggaaatcttcctctttataaactgcctcaggtacaaggacattaggtcacatacaaacacaggcaataattggcaattaagaggatgatagacagcccaagatgattctggctcccaacctgcaatatcccagctctcagcaatcagttattcagccttatagaatgtttgtttaacacaggtgaggccttttccccacaaaccagtttccattcttttcctcctcatcctcttcctcctcctccttctcttccttctttttcttttttctcctttggtttcttgagacagggtcttgctctgtaacctaggctcctgcctcagcctcccaagaactgggattacacgtatgccactacaccagatcaaaaatgttcttagttatcaaattagcaaagggtgggagagtatagctgttagatcaagtgagaacacctgtatctctaagcaaagtgtccactgagaagaactgattctggggcgagatggaattggaaaattatgggaacatgagaacatcaaagagccctttactctggagtctgcttgaaacctcttaccagctcagaatcaagaattccagcacaattagcagcatttgcttaatgcctttctcttctcccagctagaagcctagttttctagaaatctcagcagagctccatttatcatacaggacatgtcccagtccccctgtataaccccaaaaactctggctccacttcatcagaaaataatctcatcagagcacctcctgagctgggtcaaaatctcccttagcaaaaagagaaagggaacgatatttccatttttaaatgtattctttgacaacttcatgcacatatataatacattttaatcatatttgctctcctcgttccttcttttatcgcccccccccacacactcacattgaatcctatcccatctcattcctagtaggtcccccctttaagtgtctattttgtgtgtgaccaactgagtttaatcagggacccttacctcagcatgggttgaggattacttcctggagcacccggtaacttatccttgtccacatgactaaagaaatgattcttccctccccccccaaaacaaaaaaacccattaacttcagtaacctctcaggaaggaatgaggcctcatgagcccatgccatttgtgatgggatgttggtgactccaaccctgtgcatgccacagtgtgagtgtatgcgtgtgagtgtcacctgcatacatagaggtcagagaaaatttgaagcgattggttctttccttccacagcgtaggtcccaggcatcaagctcgggtcatcaggcttacaaccactcacctttacctgtcaagccacatggtcaccatggttgctgtaacatcatgagtacaaaggccatgtcgtgctcagaagacagcttttcacagtactgcccacctacctcatcctctgccttttacatccttcccccactgtcacaatgtcctccgggcactgaagggagtgctgtaggtgtcccatttggggctgagccctcaacaatccctgattctcatcacttggaccagttacgagtcctcactaagccagcacaaagagaagagtctctggtcaaggcagacagtagtacccgtctatgagtataatcataaagatttagaaagcatgcccacttcacaaaacagaaacattaaggtccccctccccttagagcctgtgacctcccctgccatgggtgtttgagcaggtttacagcataaagatgaattcccggcaggaggtggtggtgcacgcctttaatcccagcactcgagaagcagaggcaggcagacctctgtgagttccacaccagcctggtttatagagtgagtcccaggacagccaggactgataaagaaaccttgtctcagaaaaaaaaaaaaaacctcaaatacagcaagtgtttcttatttctgggcagtcatgccccacacaaataaattaatgtcatcaagattatttgaatatgtaggtttaactggagggttcagaaagaagagaggcactcaggaaggtgtgggattctctgagccactctgctgtctttccaatagtgtagagtcgctgacaggttggctttccgagggcacctgccaggattacagctgctaagtttgagtcacaagggtgagaaaatgaagggtatcttcactgtacatgtggttggagtcacatccattcaggccgtgagcctggtccattgttattttaaaatgaaggaatattgtctacctgttgaccaccttcagaactaatatgaacggtgctggaattcttgcatctcagctctgaccagacaggggaggggtgggggtagggggggacttgttatgttatagatagtgatgttgaacagaaagatggagcctgcagacccaggtggctgctcactaccatttactcctcagggccccactctctaccccccagcagcctacataagcattggcctggctggctctttcctgggcccactaggattctgggaatagctaacttggttgaagagcaggaagcaggtctagataacactaatctatcccaattcctggtatgcctgagaaggagcctgtcagtggcctcccagatcacccctcatcttggccagcatcatgatactggaaaggactatttcaaggtcccatgactaatgctgacactgttttcatcggggaacatacaccttctccctgtggtgcaagagggcaacaaatggttttggtggtgttgttttgtctgttttgtgttcccctccaccagcagtcaaagcaaaacacaagtgatcaggactaactgtaggctgtttgggaaaacacaagaagacaaaaggcaaataaaccccaggctctaggcctgggcctgatttaaagagggctggtgtttccttcaggtcctgtggtaactacagcagctggatctgcagctgcaagtcagtgagggaagtctctcagagtggcgtgtcctctgatgggtgctggctgttcttttttttttttgtttatttttattttttaattatttttacttttatgtatagtgttctgtctgcatgtatccctgcaggccagaagagggcaccagatctcattacagatggttgtgagccaccatgtggttgctgggaattgaactcaggacctctggaagaacagccagtgctcttaatctctgagccatctctccagcccaggtgctggctcttcttgactccgaagctgaggcttcagttaaagctttgcctgttttctcatgaggttgtcatcttgtcaccatgctaaccccccccccaacacacacacacaaatacccccacctccataaccccaccccagtctccagtgataatttgttttctttctgtttgtttagtcgattggtgtattttgagactgcctgtcaagtagctgaggctggccttgaactcctgatcctcctgcctccacctgtaaatactgagattacaggcatgcaccactgtggccagcagcacaggtaacaggactgcaaataaagcacacttgtggatttcactaatatctgcagaaacgtggacagtctgaatatcacaatcatcctttgctagcctctggaaattgtcttaaagacttccatagacctctaagtcctcagatgctcaagtcctttgtataaaaatgacaaagtaataagggctgagagatacctcagacggtgtattatttacccagcatgtatgagacctgaatccaatccccaatactacaaaaaagaaaaggtcttgaatttctggctgggtgtggtagcatacacctgtaaatttagaaggtagggacaggaaaggagctaaaggtaatcttgaattatacagcaagtttaaggccagcctgggctatctgaaactgtctcaaaacatgcaaataaacaaacaaaattgaataatatttgcatatacactatataaatcttcctgtcatctctagtttacagtgcctaatgctatgtactgccatgttaagttattatgtactacgtagttttacactatagtgtgtaatgactacacacacacacacacacacacacacacacacactctttccagaatatttttcaatgtggttgattctatagacaagacacctatatttggtactatatttagtaacacaggaatactcatttttcatagacgcataacaaattatgataaatggagctgtttacagtagcattcaggactgcagatgtagctcagttggagtagtacaatgtttgtgtgtatgacatgtggtgagcaggtctgagaccagtcactggatgcagtaaggcatagaaagcaacacacaaacaagcgcgcgcgcgcacacacacacacacacacacacacaaagtaagaaagttctaccagtgtcatagataacagccaggttctggcttgacaaactgcctctactctaatcattttatcttacttaattcactcataaccattctttctcttttgaaaaaatacacagtgagagtcctgattcatgagtttggggcttaacacattctagtgtgactctggagcaactttctgagctgctttcattgtcaactgtgtgtgggacactgaactgccacctctcatcagatgaatgagagcacacacaatgttcccaggttgtagttcagtcatcccctccatatcaaatcatcttaataactgcttttgctgattaatgctctgcccaactatgaaccctctgtttttccaggatttatggagccagattacacaggggaggtaaaaggagatttaattttccctataaacttaaaatctggaaacacaaacacacacacagcctctttcaacaaaaccttttttaccctacaaaaagcaaataatgaatggtttcaaataacccaatcatgagatttttcttctactcaattttctagccgattgagtaataagatacctctctttcagaacccttagcagtgatctgctcccaagccagaagaaaacaaaatgtgttcatagctgcagtgatcaaaagttttagtgaaggagacacaagttcaacaaatacactagcaagagcttggttgacactagtgaaatctgtggatctggccataccccactttcttcagaatggatatagcttcacctcacataaccagtagcctgtgtgcatgcctgtgtgtgtgtgtgtgtttgtgtgtgtgtgtgtgtgtgtgtgtgtgtttacctgtcaggtaaacctgtcagggagctcatccctgaagaaaactgattgtctctccttcagcaacctttgactatctatctcttcatccaaggtcagatctgcaaaaataaataaataataaataaataaaagatttacttattatttaccttatgtatatggttgttttgcctgcatgtttgtctgtgccccatgtacatgcagtgcccaaagatgccagaatagggtgtcagatcctctggaaatggagttacagacagttgtgaaccactatgtgagtgctgggaattgaacctgggtcctctggaaaagcagccggtgttcttcattaaaatcaaggtgtgtgattcctaacagtggagattaatctatggcatgcacatgcatcagtctacatgtacacacgattcacacatacatgtgtacactcacaagaaagaccgtcttaatcatgaaattataggaagaataaattttatgagaggaaataatgaacaaaaacaaaatgatgaacaggtaggatgtaatcaatcatgtaaagcaataagcccctgatattaataaagatggaagtaaaaaacaataatccaagcagtcagaaaagccaataaaattacagaaactcaggggacagaggtaaaagcacctaacattcttccagaggacccaggttccagtcccaatatccaatggcagctccctgacaccctctgtaagtactgcatgcaaatgttacacagacattgatgcaaacaaaatacctgcacacatgtgctgagctggccccaccctttaccggctctgcctggtgggatagtgaagcagaggaactggccctactcatcaggggagagcctcttctcactaggaaaagatggctccacccctcaccacaggcatgctcctcacctgatcacaggtgagccagccctgggagcaggagagcagggaatctgatcccatccccttgtatgccccgtacaacaacctggaaggagggtcctgcacctcaactgagcaaagcagtagacagtcgacttgcctgaggacggatcaggatctgagggcctgagagcaggagaactggccctgctcctcactgcaggctgccttgggtgagctagctgaggcagtgctcaagagctcaccatggtagtgatgatgagggaaaactagtgagcaagctgaccaacccagctaccacccacatccagaaccagggctgtgagttggcacaccacgatatccacctcatctataaactttcggacaaactcacagatccaaaacagcagaatctccataacacaggacaacaggatatcccagaggaaccccagtgatagcccattatcgctggttggtctagcaaaagcccagaggcctccagtcagaccaatgattcatggcaatgaacgcttgcaagtaagcatgaaagactaaaagcaaaactgtgtgtctcaatgagccacactacagcttctataagactcttcttcttttttgttttattgttgttgctggttttggttttgttttttgtttttctctttgttttgtttttgtttttcttttaaatttggttttgttttgggggaggttgcaagggcagagggtggatttgaggggacagggaggtaagtgggattggaatgcatgatgtgaaagccacaaagaatcaataaaacgaaaaagaaaaaaattgttaatatgactaaacaaaagtggtgtgatccaattcgaatagactgggtggggaagctgagggccttggcatccttaatgttccactcagaatccttcccaccatgatctgggtcagtaggcctctggggtgagaagggtcttatgaccaacctatcggacaagaatgggtgataagattgatggtcatctccaatgcagaaaggtgctaagactggagtttacataaccctacccaaaacagaaatctaagtttttatgacttgtgttggtaggagttccaagcaaagaaccatggggagttgaggtgtatgtgtgaaatgccacacctattagaaactggtcaatcagagaacttcttctctcctattttggccttctcccctgtatcctcttcagcctccccagggatggaaatgtgatgggctttcccagcccagcatagaggacttctctatgaccatctcctagatagaaaggcaaatagagggtagttagagtgctaacttgagttctaagcttactggaaaagaggttctagtttctatcatgtgagtcaggggagaaaaggctgagaaacaggaatgcacagttttcacactgtgaagtctcccatcactcaatatgtgccacagtttggggtgtattccgtgccccaacaaggacaatgttgtatcgtgtggcattcctctacttgagtccagccagctagcaccctacaggtaataatcgcctggactttagccttgagatggaaactagagctgtgtaaacagggcagggtaagactgtggatcaggtcagacaactgggtgggagcaaatgaaaaagcaggagccggatgttgaggcgtggtcaaaaggttgcttttggcctaggttctagagtccagggctcaggccagcaatctcccaaggataacattaatggtgcttttagtattgatctgctcttggaacacagacacacatcgaattaaactgaatcagaactcgattgcatgcagaatccttgaccgcagctggactttgatacatccgccttggctcagcaggatcatgaagcagctttgtgctgatgctagagaacctctctcttcctaggccggggactggaacttttctccatctgcccttgggtcaaactccaccatgtccttaattgcttttgtggctccctttgaagcccaactgtataatacctggatgatttctctgtcctgctaaaaactgggtatcagctttttactttttgttggttttgtttgagacaggctctatacagcccaggctggcctcaaattcacagagatatgcctgcctaaaggtgtttttacaacacctcatcttttattttttgatacaagcccaggctggccttgaactccagatccttctgcctcggcctctcaagtactaggagtatatgtatgcaccagcacacctggcttgatttgcagattgattgattgattgattgattgattgattgattgactgattgcagaatcttatgcagcccagactggcctcaaacctgctttggagcccaggatgattttgaacttctgatccttcagcttccacctcctgatggctgggagtgtaccaccacacttacatgatgctggggatcaaacccaggacttcatgcatgataggcaagcaatctaccaacgacctactctgtcagcccacttttcacttttcatgaacattttaaacctgtttgggggctggagagatggctcagcaattaaaagcacctggctgctcttcagaggacctgggttcaattcccagcacccgcatggcagcttaccactgtaattgcaactccaagagttctgacaccttcacacagacacacatgcaagcaaaaacaccgatgcacataaaataaaaaataaaataattttttaaaaaagaaaaaatcttgtttgcctaagaagccatttcagccctattggtagactcccagtggttttaaacagactcacttcctgccatttcttgtgtgaactgaaagtaatccatgtggaaatctgttggaaactgaatttctcatcaatgttattttctagttcatctcttcttgtccatctgggcaaataataaggtcatttggcaatggctatgtaattagacccaatgcaaaacctgttaagtatttcaagatggcagaaaggtgctaagactgtagtttacataaccctacccaaaacagaaatctgagtttttatgacttgtgttggtaggagttccaagcaaagaacttggagttgaggtgtatgtgtgaatgggttaagtatgaagcccttcaaagcacaaggccttgcacaatgaccggtgtggcctactcacagagctgatcctgtgtcagtaattctcagagcaatgagagtggcttgcaaattccatcaacttccaccctgcccttcccctgcaagtcagtcaaagaggccagccagcaattgtaagctctctaataattacaaggtaggactataaaaaacacatagaaggagcataaggaataatttattttctcacattaaaaagcttaatgaaaacagctgtcaagatgactcagtgtggccaggtggtgcaagcctttaaatcccagcactcgggaggcagaggcaggcagatctctctgatttagaagccagcttggtctacagagctagtttcaggacacttagggctgttacacagagaaaccctgtcttgaaaaacaaaaacaacaacaacaacaaaaagatggctcagtgggtccaacctccttggcccacacaggaggcaaaaaccaacctgcctaggtagcctctgatctccacatgtgcacagtggctcaagtgcatacacacacacacacacacacacacacacacacacacacacacacacgaagaaaaagcctacactgatcttgaagtctggctatctttattttcccgttagctccacatgacactggccaagtcatctgagatagtgtatgtggtggtggtgcttacatgttacaaacttggactatggacaactgtaaacttctaccattgtcagttttaagggaagtttatgactttcaggaagcttgcttgtgttctggaccattctctctctcctccttcctccttctccctccttttctccttatatgtaactatttgaacatcttagtatgcttttaagggcagggccacactcacccagcctgacctctgcaggattgtgacatcagagttctatttacaaagctagggactcggatcactgggatgacagtggagtaaaacacacacacacacacacacacacacacacacacacacacacacacacacacacacacacacacacactgcttgtctttcctttgtaccatcagagctgtcagttgttctaaacaacaaagagaaaagatcccagatgggaaaacagctcagttgggagagtccttgcctaatgtgcccaaagccctgagctcaaaccctagtactacataaaccctgtgtggtatacacatctgtaattcaaacaatcagaagttgacagcaggagaatcagagttcaagttcatcctctgtaacaagtttgaggcaagcatggaatacatgagaccctgtcttactcagtgttctattgctgtgaagagacaccatgacaacagaaactcataaaggaaaacattccattgagggcttgcttaccgtttcagatgtttagtctatattattgtcatggtgagatgcctggcagcatgcaggcagacatggtgctggagaaggaaccgagagttctatgtcttgacccacaggcaacaggaagtgaacggtttattccacactgggcataccttgagcatatatgagatttcaaagcccaatgccacagtgacacacttcctccaatgaggccacacctactctccctaatagtcccacttcctatggtcaaacattcaaaagcatgagtctacggggccatatctattcaaaccaccacagaccctatctgaactccatactagagagaaataatgtgttaggtttttctctgtcatttggaatcgtttctctagaatttcccggatgctgctcagccaagaatatggaatagccaaggatgtgtctcaactgtgggcttttggaagcctctgccattcacataccattctcctgtcctctacatctccatggcattggaaagaataggcaagggatttccttattggctacatggggcaaaggtagagttcctgtttcttccacagacatgcactcaacacatctcccagcaacatgtgagggaccacaaggtgtgacggaaataaagtaaaacaaattggaatttctcctaaagaacacgtttccaagatcagaaacttccctcattccccttcataataccctcctaccttcatagagtgccacaggcaatagctgctccataaatctgtgaaatgtttgctcactgaagtcattgtgacttctaacaaaataggtgtgatggaaataaagtaaaacaaaccccctgtagatattgtagagaagattgaccctttaaagtctcatgtttttgaccatctggagaaataccaccactgccaaaacagtaattgacattcgttgagtacatatttttcaggcaccacggatgcatttgtatcagtcaactcatttactactcaactgccctagtaactatgaggtaggtaccactgttgtcttgccttatgaccgtgacactaagccacagaagagtgacttgcccagtttacagagaattcacctgcctccacagatcccattcctaatttccaaattggaggtgtctaatccctctaccaccaaccacaagaacaaattagaacagggacttaaatatcaaactcaaaacctgacgcaagagtagaagcagacagtatttgtccatgctatattactccgtaccatgctatctttaaagttacaacacaccaatctgacttcagattgcatagtttgaaaagccctgggtgttgcggaatagtcctttgtaccatgtaaagatgtgtcactgtgattggtttaatagaaagctaaacggccaatagctaggcagggatataagtgggactcatggacagagagagctctgagaagaaaggcagagtcaccatccagaggcaaaggaagtaggatgggcctaatggatctggggtaacgaaagtgtggaagaaagtagattttaaaatatgggttaatttaagttataagagctagttagaaacaagcctaagctaaggctgagctttcataattaataactttctatgtggttatttgggagctggcaagtaggaaagagaaagactggttatacctgggtttggggaaaagccaaacctggctaaggtcactgcaatctctaaagaaagcgaattcgcttgtgaaatttttcttctgaagcaactcagctgttaacattcctagcatgcagtgccccctttagcagactcccttcggatcccgggattctggaaacctctcctctgcccctctttctccattacttcctcattagaggcagccatttctgaatggggtctctgaggctctgcctttcagccacatccatctggtccctaagaagcattcacctccccccacccaccaagtgaaaaggttacctctgtctgtgcactgtgatggatcttaacagaaccatgtgcaaacctcatgtcccattcccagcctaggcagacagttgcagggggtatgggtacaaacaaagcctattacttagccttcttgccatctctaactgcactgcttctgatgtggaagaaagggaggggtaagagggtttcagtctcataatgtgacctggacaaacaagtgataaacttatcaaagtagactgggatgggaataaatgggcccattggtgtatacttaaactctgtcagaaaagccaggcctccgaactgaatacacacaagagcaactaaggtcttacctggaccccatgagaagcacatccaacaccttgatagctccgcgtttgagcacacacagacagacagacagacagacacagacacacacacacacacacacacacacacacacacacacacacacacactgcatctgacacaaagactacatgggcaacctttactgtgaaatgccatcaaacctgtgagtaaaatgacttcccactcagccccagaaaatcatgaaaaactcaaaccagtctaaaaggacctttgtcctgatgaaattcccttaagtgattaggataacagcaagaaattagggtacctggctctggatataatccacacctcatgtcctaaggtgacttccagtctttacatccccaaaacattaaatgtagctcttgaatacactgtgtagaaaatgaagttccttgggaagggggtgctggagagatggctcagcaatcaagagtactggttgctcttctagaaaacatgggttcaattcccagcattcacatggtgactcaaaaaccacctgtaatgctagtcccaggacataatgacaccctcttctggtctccttggacactgtacacatgtggcacacagacatatatgcaggcaagcactcaaaaacataaaatttaattgttagtgtgaaactggagaacatgaaccttcacagaaagaagcaagttgactgatcaaaaccagacacaaattttcatatttcagccacagtggcacatatctgtaaacccagcacttgggagttccaggtaggatttgaagctcaaggccagtctgagcaatataacaagaccctatctctaaaaagttagaatccaggccaacaagatggtcaagggtataaaggcacctgctgccaagcttgacaatcggagttcaatccagggacttgtatgattgtcctctaccctcacatatccactgtggaacacacacctacccacctacaaaatgcacacaaaataaaacaggaaacaaaccaacttaagctgggtatggtggcacacttaatcttagcacttgggaggcagaggcaggtggatctccgagttcaaggtcagcaagatctatatgtagagaaaccctatctcaaactagaactcatcctaaaatatgttaaatgttcttaacaaataagtcgtgacattaaggattccatgggctggggatgtagctcaaatagtagaacgcttgcctagcatgcatgtgacatgaggtttgatctgtagcacaacagagtatgtactactgaggccaggcatagtagagcacacttaattgggatgctgaggcttaatgacctcagtgaattccaagtgggcctagactatacacacagtaaaactctgcaacaaaaacaaaagcaaaacaaagaccaaaaagccaactcaaaagttcatcctgtttcccaactttctgaacactctccaaatataaacttcattattgctttgggtttggtgctggagactgaagccagtgtctcacatgccactgtggtaggtatagcccctaccactgcactatacacctacccacccacccccacttccctttctaagagggtcctcctatgctcatcaggctggtctcctcaaacgtctgggctgaagtgaccttgtttcagcttccccagtgctccagctccaggaacaagctaccattctttttgctctatattcatttcagttctcagactacccaccatctatgacttgctctccaatgtttttgacctgtccttacgatgccatttcctttggctgcattgatttgtttcccagctcagtctctaaaggtgcaactgactctcttccatctatcttacagctgctcctccaggtacaagaacaggaaaatgcagaaatttcatcaggaaagcaaaactgccctctttacttccaagctgctggtccttacacatccctgtcacataagtgccctgattgcaagctgctaaaccatcccagaagagtctagatgagtgctgaaatgtagttacatgtagcaaacaggcaaggatgccccacatcaacgtgtggttggcacaagccacagttacagaactgtctaaggattacacaagagagtcagatttaaacgtttctgcttcctgtaactcccaatgggaaccttcattcttaaagtgttgacttttgagtactcatatcctctgagtacttcccaagtaaacctaagcaccttgctacaggcattaagggtgggtgaggcggggacatctggccaagtttgatggacttttaatcccagcacttagaaagtagaggcaggtggatctctgtacattcaaggccagccagggattctcagaggccttgtctcaaaataacttagggagggaaggtgcttggggaaggggctgaggggggcggtatccttgaaggcaaggctcttagtcgtacaggacaccactccttgatagatctattcaggatcataaagacaccttaaagcaacaaccagccagtaaatttgaaacagagaagaccaagctaaggaggaaaaggaaaaagtaacacatcatcaaaatttatttcatggcctgaaaacattcagactaatcaaagtagtactataatttcttataatacatcaacaatacagaagcccagagaactaacctccaaaccacacaccatacaattattataaagcaatcactgtttaagacaatgtgagatgacattagcaatgaactttccttcatacacttaatgaaacgtaatgaacagcaagctattcttactgaattaacacaaatctattcttgtactttccatgtttgtgttacctttgcttcataaatccactgataattcaggcttattttaagtatggaacttccatcatcaacaattctactttgtaggctagggatatagctcagtagagcacttgcattcataatgctgactgagttccatcctcagcacaccccacgaatcacatgtatgtgtggttaaaattgcctttctcatatgttgagcagtggtggtgcacgcctttaatcccagtgctcagaaggcagaggaaagcagatctccgagagtttaaagccagcctggtatacagtgttcaaggacagccaaggctacacagggaccatctcaaacacacacacacacacacacacacacacacacacacacacacacacacacacacacacacacacccaaaaacaattgccttcataggttaatgtgtaccctcccaccaggcagtgcctccaagccagcaaacctgctgccattcagcaatgattctatgtgctgatggggacaaagtgacctcaatcccacttcaactgtaaagaactcaagccaccaaaagttagagtaagaaggaaactgggagatataaagatatttaactaaaactaaaaggactctttagatgagcaataaattatattgaagtagctgttcatacagagctacatagacttacacttactttgaaaacataggatcacactttataaaaagatacttctaggtcatcatttacttattagtttccgtaaggagaaaacaaagtattttgtgttcttctaggaaactgttataaccaaacctggtggtgcattcctttaatcccagtgtagagaggtggatctttgtgagtctaaaaagcagccagaactacataatggaagcctgtctcaaaaggagagagagaaactgatatatatgtgtatgaatgactgtgttcatttcaatcccaaggaagcctataatgaagttggttttacatgcactgaccaccattctcacggtaatgaatgggatggcacacacgccgtctctgaagcacaaggtggtaggataatcccaatgcaaatcacatcaatcgatttaaggggggaaaatgaatcaaagccaaaaaaacttaaagagcaagaacatctactctttaaaaaggcatttaacaacacggaagcaagacactgaatggcttaaaaagtatcgtgtaaggctctgggttcaatcttcaggactgggcagaaaagcaacaaccctgatgtggggacaactgaggccacttcaagctgaagtaactctgtgcagacactgggacactaaaatgaagtgacctcatgggaataaatttgtagctctgtacaaatatattaacacacaaaataattaaaatgccctctagattgtcctccccgggtaagttctgtgtgccgcgttgcctgggaaaaggcctgtacagcagcgccagtgcacagggttatgagaacagcattgcatccagtcttcactcccacccacattcacagactttatttccacttcaagacactagctttctagtgctacattttaatcaacatattacattttaaaagtcttgatttttgaatgaatcttttagtactatataacatgatggaggtaatagctgaagaccacttgacagctacagagaaaggttccatttaaaatatgaccaaggtgagactgtatcacaggcaatgagacactacagttagtggacagataaggcatttttcagtgaccattcataattttgcctttagaaacttggaagaaattgtcatctttgaatttcaaatgttctggcaaatccagttgctttttggcttcttcaatatcagcttgaattgctgaaataagtgattctggaaaaagagaagaaaaaagataaactgctaataatgcattttaccactcttttgctcagtccctcctaaaaacacacaggttagccaacctagccccacatacctggcaaaggacaagggctcaatcaatgttcataccctgtctgtctccagggaaagtcagtgctacacaaagtgttctcttgtaaagaaacctttccctaatggggttttaagttctcactctataccaacagggacttgacaatggaaccaatctcctaactactgtttttttacacttccagcacctactgcccagccagccttgcagggtcagatgccaggtaccaccacttactagctaactgctgtgagttgggtgtgccctggaattcatgtgttaaacaaacagtccctaagattgaaggtatttggaagtggaaactctgggaagtgactgggccatgggggcagatggctttatgagtacccagggagtgactgtgacagaagagtgacttttcctagccctcgtctgttccaccctgtgatgctacccactgaggcagagagaaggcctttaccaagtactaaccacaatggctccagcttccagaactatacaccaaataaacatctaaactacttaatctctgtgtgtcaatttccttatcaatgagataagcataccaacacctcacatggctactgtgggtgacaaagggattaacttgtatatgatacttgaattaaatgctcaaatatatgtcctgttatcgtggccacttaggagcagctgtaatagtattgaagattcatataaactcttacctaaagaatcgaagttcttttctggtctgaggtagccaacaatggccacattgagaatttccccatagaagtcctctttgaaggtatgtatgatgtgggtttcctacaaacaaaaagggttaaaaagattaccttggaactgggcagtggtggtgcatacctttaatcccagcactcgggaggcagaggcagaggcaaaaggatctatggagtactgagaccagcctagtctacaagagctagttccaggacagtctccaaagccacctagaaaccttgtctcgaaaaatgaaaacaaacagacaaacaaacaaaaagattgggggtgggggtgggagagctgcctcaacaaccagttaaaagcagaagacccatatttgattcccaggatccagaggatggggcataactgtgtgtaactcaatttccagatccaacaccctcttctggcctcctctgacaccaggcatgaatatacatgcaggcaaaacatttatatgtataaaataaaataaatgaatttaaccaggcagtggtggcccatgcctttaatgaggcaggtaaatctctgagttccagccagcctggtctagagttgcaggacagccaggattaaacagagaaaccttgtcttggggggaaaaaaacccacaagccatcaactttaaaaataaataataagactatcagtcttggcctgccccctatttaaaatgatgtgggagataggataactgagtcactcaggttttagcagcctttcctcatgaggacatctaagaccaggaggcacagagttcagcacggtggtacacacctgcaaccccagcacaagacactgaggaaaaaaagaagcctggtgttcagaggtccactacctaaaaattccaggctgccctgggctacacacacacacactccctaccccaccccccaccaaaacacacacactcacaggagacaggaaatgttaaaccagatgaaagtaggattgtatcatatactgggaattttaaatgtaaactagaaatatctatcttgaggtatatttttaagtgtatgactttaaaatacctagtttataaaattatccttaacattaaagtatctattgtaaggattcaggcattatgctgacagaatacacacaggcagtaccctggtcagtgttccatggctactctgtctgcatgcagatgcaaaggatccctttaaaagaaagaccctcctgcccacttacactctctttcccaatgttcccttggagcagacaggacatttgttgtctccctcttctcttctgtcctctctctgtctctgtgcctctttacctcttctccctacccccacctccctttctaataaaacttctcactaagctctgtctacctggcatgtctgtccccctacctcggtcacccttgcccaccatggaatccaacaaggtcccccaagcgctttgtcataacatccaatcacaaatacttgagtatacctacaatcattcagaacgagacacttaaaaataaaattatgactgacctatttaaaaataaaccaaaacaagaatatgatactggtttttacctaacatagtaagataaccaaccaagtacatttgaaatatgattcagactcaaaaaggaggaagaggtttttcgagacagggtttctgtgtgtagccctggctgtcctagaactcagagatctccttgcctctgcctcccaagtgctgggattaaaagtgtgtcacacctctacccagagaaaaaccagtttttaaaagtaaaagcctaaataaagttaaccctctttttctctagacttccctttccctgctgtggatcagaccccagcctttcattcactgtgtgagcactccatgctctgccggctctttccaggcagtcttggcttgtgcgctcccctgggttctgcctcctggggacggagactgcatgcaagccttgtctccagcagggtgctcagagctgagacagcagctaaccaaggagcagctaaccaaggagcagctaaccaaggagcagctaaccaaggagcagctaaccaaggagcagctaaccaaggagcagctaaccaaggagcagctaaccaaggagcagctaaccaaggagcagctaaccaaggagcagctaaccaaggagcagctaaccaaggagcagcggcaaagccgcactcttcttccccaaccttaaatttagaggaagcacttggcacatactctctttatatccacactcaaaaagacccttaaaaataagagcaacagaaaaagtagcaaactattctatcagttgatttggtaaaaaaaaccaaaagtatccaggaaaatcgtaaaaacagagctggagaacttacactgacaagtatcaagcctggtggtgcaggcctgtaattccagcttcttggggaggctgtgacatgaggatgttgcctacctgggctacagaacaagttcaaagcagcctgggcaacttagtgaagccatctcaacacaaaaagggggtggggcatgggggctacagctcagaggtaaggacttgttagacaatacaggaggcaatagctcctgtaatcccagaactcctggctgctgaggcaacattactgagtcagatcacactagggtacagagaacatttctcaaaaacgggggaggtaaatgttgtaatggcttagtaggtaaaggtggctggcaccatctagaagacctaagtttgatccccattggagtattaaaaacactagctatgaaagaaaatgatgacctgggctatacaaaaattaatagaacactattttattagggcaagactttcatgggtggccgttattggcaaataacaatattaaaataagcagcccatgctgaaatgtatgacaatgggtaactgaatttctcctaccagaattctaagctgtccagaaatggcttgttattatttctgttatctgagtagcttacaaaggaaatgcagcagcctctcctccctttcccttcctctccccaaaaacatcatgtacacgttctcttaccaactctttccttatgtccccaacaatattcaccccactaaatagtcagcagagcccttagagagttcaaggtcactgctacctattacagcagttctcaacctgtaagtccagacccccttgggaaacttctaacttcaaaaacaaatcataagagtagaaaaattacagctacaaagtagcaacaaaaataattatatggttggggtcagcacatgggaactgtattaaagggttgcagttgatctattatatcagctgttctctgttctgtgatacatttctctcttattactcctcaaagtcatagtgctggcacagtcctggcagcctggcactcaggagctagaggcagaggatggcttatgagttcaaggtcagccagggggagagcaacaccatgcctcaaaataaaattcttccattaactgtttttcacttggtctacaaaagattaacccaaatccaacaagtatttaagctgtggagactcttgtagaaaagtaggtcagggggaaaaaaagccagttgcagtggcgaacactggtacgatttgctgaaagaggcaggaggatcacgagttcaaggccagcctgggctacagattttactaggcagtggtggcacaagcctttaatcctaacactctggaggcagaagtaggtggatctctgtgagttcaaggctagcctaatctacaaaggagttccaggacaggctccaaagctacacagagaaaccctgtctcaaaaaaccaaaccaaacaaactataccctaaaggtgattttagggactaggagggtagctaaatagaacactggcctattatgctatggccctagatgattctcagaaatgttaaaaagagagagagagagagagagagagagagagagagagagagagagaaaggaataaagttgagccacactcagtaagcaatctgaaggcagtcaagcaagtaaccctgaaattctaactgtggcaaagatcaattttatgaagtggtttttaaagaacctcgtttttttgagcctgtttggtggcccatgcctgtgataccaatacttagaaggctgaggcgagagtatcttggggtcctgggctacctggtgagtttccacaccagtctaggctaaataggaagtccctgtcttgaacaaaacagctgtgcatgatggtccttagcctcagcattggagaagcagaggcaggtggatggatctctgtaagttccagacaggtaggattacacagcaacaccctgactcaaaaacaaacagtaatacctcacttttatttctgataaatagataaatgcacaattacaaaaacaatgtttcagctcctggtagcccaagtcaatcatccagcactaggaaggctgaagcaagaagactacagttttcctgtctcaaaaagaaaaatgatctaataaaacagataatattgagggaaattaccacttgtaatataggacatacagaaaacaaaaaaagcaataatctctaaaagttaactccagttccaggggatccaacttccttatggggagactcactttattcaaaggaaacaaaaaaaagagagagagaaaatatccactcaaataaaagtaaaaaatgttgggggaggagagcaggaatgaagtggaaatgtaggaaagcatacagcctaagctattcttttttgttttgttgttgttttgagacagggtctctatgtagtcttggcttccctggaattcactatgtagaccagtgtgacttgaactcacagaaatctgcctacctccacctcccaagtgctgggattaaaggtgtgtgacaacacgcctgatcacccaagttattcttgaactcatgatccctcaccaccatgtctgatactttactgaaacccttcgtatgctgaggagttctgtgtgcaattaataaagcaaaatgtgactcttaccatggactttttcacattcttgtagtatgggttccatcctatgctcaccaccattttatggacatctccactcccgacactggcccagccataataaatgccagtggacacatcagctggaagattgtctactacttgttcaggaaaattggctaaaaagaaataaacagatattcagcattacaagtttcatactaaatactgattaatagcacattaaaaggttagcctgaagacactccgactcccagtccaaccctccatattctggctgggatttcttctttgcagacgcacaggttaggaatgaggcagaaagcaagtgtatgatatctcaaatatctacacgaaaatgtccaagtggaaagaaagacataaaataaacggggaggctcaacggagattacccatacctctagtcccactatgaaagatctgagctcaggaagtaggctggcagcctgggaaacagagctaagtcccgtctgttagaattaaaacaaacgaagtcccacctctttcctagtaacgctcctaagtaggctgagtcacttaaacagattcttattttcaaaatacacaaacccacatcccaagttcaatgggccaagaagcagcctaggtatcatctttaagggcgggcagcaaaatcttgattactaaaactcacacgtagtcagaccaaataaacgttggctctcatagaactacccccgctgtcaatgatcactatatctgaagaatagaactttgaacagcttgagagttcggccaatccatcctgcaataccctcccggaccgggctccgcggctcggcggcagcagcaggagcgcagccacccgggatcccggtccccggccccacgacccagagctccccggcctcacgagacgctcacccgtggggatgcccagctgcttggagccgcggccgaagccacgcaccacctcgccgcggcagaagaacggcaggctcctcatgacgccgacctcggcggacgcgggctgctgctcgctccgcgcctgcggcggagccgccgtgagtgcggtgtccgggcccgggccagccggggatcccgcaggagctgggttggcggagcgggaacccaccgctaccggtgcctgccggcagagcagcctcgggccgtcagaactcagcggacgctcctccggaactgcgacaaccgcggtgaacgaacaagtcgaccgcccaggcgacgaacctgctcggcttccgtacctcccccgagataacccggcctctgctgttacggccccgcccagagcccccgctccgccccgcctcgcccctcccctccggttgaggccccgccctcacccgtggcccagcctctaattgcctccttttcagcttttttagactgggctattctgaaataagcgtggctcacgaaagagtttcagttgttctattttcctccgtaattttgcataaaattctgccccgtctttgcagccgctttcttttcccttatttgtatgtaactctgagaatgtttaaaaatgttttctctatgttggtacaaaagggactttcttagtaaagtttcatttccttgagccctgtatactaacacaaaacaactatctgtaactgatggcgaacagtcagttgagataactcactaccttcggaccagcctaaatcaagtatttgcagaaagatcactgcaaagtgctggggaagctagcaccacatcagaagcagacagtctaacagaagtcttcagagaagttttaaaaactgcctatgagccgggcgttggcggcacacgcctttaatcccagcactcgggaggcagaggcaggcggatctatgtgagtttgagatcagcctggtctacaagagctagttccaggacggcctctaaagccatagagaaaccctgtctcgaaaaacaaaacaataaataaataaataaataaataaataaataaataaaaactggctatgaatctaccactgttgtcctagataaaccagaatttgaatgcaagaccctgcaaccttgaatagctaatgtatgaaaactgcttaacaaattacctgccaagtactgggattaaaggtgtgcactaccaccacccgaattaagatagatgtttttgtttttttttttaaataaagtaggcaggatgtggtggcatgtgcctctagtcccagcactcagggaggcagaggcaggtgagtctctgagttcaaggttagcctattctacaatgtctgaacaggctacacagagaaacactgtgtagtgtgtttggggggggtgagagaaagaatatagataacgctaaatttgtatcatacatactatcttacctaatcattacaacatcgttggataaagcattcatcgccatttataaagaaagttggagaatttctaagaggaaatgatgccctccattctcccactcctcacccctgcttcccccctccccctttactttttgaggagaggttttgtctgtgtagccctgactaacctgaactggcagccatttaggccaaactggccttgaattcacagaggtctcccacctctccccctcacgtggtgagattaatggcatgtgtcaccaggcccagcaaggtccattttcaagttgctattgacatgcattcctatgggaacttaactgtgcactaatgtaggtagagaagagaaaattctgatccttttccatggcatctctgtagccttccttccatggctcccttttactcaagaataaagttgcccattaaggtcctatgtctgctcaatgttttaagtagtaatcaaatccaaatccaacaatgccacttcaaaacgggggagagcaaatgcctgcagatactcagatgtgtaggccacgtgatttattatttttcacactcattaacagtattccaatgcatttggttcaagagatacataactgaacctccctggttaccatttcttaatgcaaatctagagtcggaaaagagaatgtgttggtcaagtttagagcttttaaacatgaaaatattcctatttcccccttctgaattgcacttgcagcacccgcctggcctctgtctaccaagaaggggagcctcctctagctaagatatgtcttcagcaagaaaggtcacagtgacagtaaactgggacatagtgaaggaaaagatagtttactgtcaatttaaaatgaatctaaagaatgttttaatattaagaaaataagcataccaatttaaaaaatagaaaaagcaggccaggctggatggtgcacacatttaacaccagcactcaggttcagggccatctgattaacagagagttccaggtcagccaaggctacatggtgagaccttgtctcaaaaatagatgatacatacatacatacatacatacatacatacatacatacatacatacggagacaacactacacacccatcagaatggctaatctccaacatgctgataaccctgacaattaacagtgtcaagggcaggttctctcatccagagctgatgacaatacaaaataagttggcggattccaatggctcttggcagtttataaaactaaacatactttttctataaagtccagcagttgggccagatgtggtggcatgtggctacactcctagaatttaggagactaggatggaagaatctcaagcagcaggctagcctttgagaacagacataaagttctgcctttgacagcagacacataaaatcctccaagaagccctaatataaaaaacacaaaatactttattatgctatgtaaatatatcttgtggttcaaagttacaaaatgtactttggccagtgcagactgactcagtgagaacacattaaagcgaacactgtgtgcagaggtagggaatggatgataaatgtttcttcaaccttctaagttcttacttggatgttgtgtgatgcttttgctcttttactcttttggctttttgtggggcccaccacccagctcccaaataaatcacacacagatgcttattcttagttatgagtgcctggccttagcttggcttgtttctagccagcttttcttaactttaaattatcccatctactttttgtctctgggctttttccttttcttctgtatatcttacttttactcttgctctatgggtggctcagtgacaggacactgatatcctcctctccttgttctctcgtttcttctccttttcctcagttcttctatttatactctctgcttgcctgccatcctctcctatccatgctcctcctgcctgactctttattaggaccaccgagtgttttagacagccacagtaacacagcttcacagagtcaaaaaatgtagcataaacaaaagtctcacaccttaaaataatattccccaacacttggaatgaactccagcaacaaaagaaaaaccagtaagacacaaacaaccggaggttcactgatgtaaacgccctgcacacaccagggtttcccagggaaggagtgatttccagagaggtgactcagatcgccagctaatccagatcgtcactagacaacagtgaaggacaggacagaggaaagaactagggaaggtttgctgtctttttgttgttctgagacaagcttttgctctgcagtgcaggctattctcgaactccagatccttgcctctgcctcatgggtgctgagatgagaggggcagcaccaagtcgggtgaggaaagggggtttgtgtctctagggtgggaaatcatggggatgcaaacaaatgacaccagggcctgttggtaaagcccgtccatgaaggcctgaaactcacagagatccacctgcctctgcctctgcccctctgcctctgcccctctgcctctgcccctctgcctctgcccctgcccctgcctgcccctgcccctgcccctgcccccctgcccctgcccccctgccctgcccctgcctctgcctctgcccctctgcctgctctgcctctgcccccctgccccctgcccctgcccctgcccctgcccccctgcctctgcctctgcctctgtagtgctaggattaaaggtgtgtgccacccctggcggcaagaactcgtttttgttgttgttattgttgttgttgttgttaattatgtaatgtgtaggtgtgttcacatgagtgcctgtggatgccagaggcatcagatcctctgaagctggagttacaggcagctgtgagctgatatgggttctggaaactaaactcaggccttcggaaaagcaatatctgctcctaactactgagtggtctagcccatctcaaacaatttttatgtcgaagaagtatggctacctattctgatttccctcaacagacactaggaatgtgaacttagttcatatcacaggaaatacatatattttttttacgataatgttatggtagtttgaataagaataacaaagacccttcccatcccatgaaatccctttttatttatttgtttttgttattaatttgtttttatattatgggcattggtgttgggttccctggaactggagttacagacagtgtgagctgccatgttggtgctggaaattgaacccggttcctctgaaagaacaggcagtgctcttaacctctgagccatctttctagcccaggcttatatatttgaatgcttggtcacaagggagtggaattctttgataggattagaaagattaggagttgtggccttgtcaaaggaagtctgtcactaggagtagactttgaagtttcagaagcctatgccaggcacagtcagtctctctgctactgctacagtgatgagtgacaccatgctcctgccatacccccacaatgatgacaatggtctaacccgcccaaactgaaagcaagactctaattaaatgctttcttcttataaaaattgccttggttatggtatctcttcccacaaccgtggaaacagctttcataacatattttaatgaaatttggatcaactgtatttctaacttcttgaaaaacagatttttaaatcattttttatttgaattagaaacaagattgatttacatgacaatcccagttcccttcaccctcctgtcctcccctgccaccaccacccccaactaaagccctacctatcacttaccctttcttctactcttcacctgactcaacctttctgctccctcatgacctctgcatccttcctcttcttcccttctgattctcgtagctccctccccgctcatcccatgttctcaatttgctcaggggatcctgaccctttccccttctccaggggacaatgtttgtctctcttagggtcctccttgtttactagtttctctgcagtgtggattgtaggctggtaatcctttactgtatgtctaaaatccacatatgagtgagtacatatcatgtttgtctttttgtcattgggttacctcgctcagagtggtttcttctagttgcatccattttcctgcaaatttcaagattccattgtttttttccgctgagtagtactccattgtgtaaatgtaccacattttctctattcattcttcggtagaggggcatctaggctccctgcagtttctggctattacaaatagtgctgctatgaacatcattgaacagatgtcctttttgtaggactgtgcttcttttgggtatatgcctaagagtggaattgctgggtcttgtggtagactgattcccatttttcttgaggagtcgccatactgatttccacagtggctgtacaagttggcactcccaccagcagtggagaagtgttcccctttttccacatcctctccagcataaactgtcattggtatttttgattttagccattctgacaggagtaagatggtatctcagagttgttttgatttgcatttccctgatggctaaggatgttgaacactttcttatgtgtctttcagccattttagattcctctattgagaattgtctatttagttctgtaccccattttttaattgggttgtttggtgttttggagactagcttcttgagttctttgtatattttggagatcagccctctgtcagatgtggggttggtgaatatcttttcccagtctgtgggctgccgtttttgtcttgctgactgtgtcctttgccttacagaagcttctcagtttcaggaggtcccatttatcaattgttgatctcagtgtttgtgctactggtgttatgttcaggaagaggtctcctgtaccaatcaattcaagggtatttcccactttatcttctaataggttcagtgtggctgggtttatgttgaggtctttgatccattttgacttaagttttgtgcagggcaaaaggcttgggtctatctgtagtcttctacatgtccgcatccacttatgccagcaccatttgttgaagatgtcctctttgttccagcatatgaatttggattgtttgtcaaaaatcaggtgttcgtaggtgtgtgggttaatatcagggttttcaactctattcctttggtctacctgtctatttttgtgccaataccaagctgttttcaggactatagctctgtaatagagcttgaagtcaggatgttgatgcctccagaagttcctctattgtacacctatcctgggtcttttgtttctccatataaagttgagaaatgttctttcaaggtctgtgaagaattgtgttgggattttgatggggattgcattgaatctgtagattgcttttggcaagattgccatttttactatgttgatcctacctatccaacagcatgggagatctttccattttctggtatcttctttaatttctttcgttagagactcaaaattcttatgatacaggtctttcacatttttggttagtgttaccccaaggtattttatgttgtttgtggcaattgtaaagggtgatgtttctctgatttctttctccaccaatgtgtcatcgatatatagtagggctacagatttttttgagttaatcttgtatcctgccactttgctgaaggtatttatcagctgtaggagttccctggtagagttttttgggtcacttatatagacttatatattatctgcaaatagtgagagtttgacttcttcctttcccatttgtatccccttggtctccttttgttgtcttatttctctagctagaacttcaaggacaatattgaagagttatggggagagtggacaggcttgtcttgtccctgattttagatgaattgcattgagtgtctctccatttaatttgatgttggctgtcagcctgctgtatattacttttattatgttgagatatgttcctgttatccctgatttctcaaagacctttatcatggagggctattggattttgtcaaaggctttttccacatctagtgagatgatcatgtgtttttttttttttcctcagtctgtttatatgatggattacattgatggattttggtatgttgaatcatccttgcatccctgggatgaagcctacttgatcatggtggatgatttctctgatgtgttcttggattcaatttgccagtatttcattgagaatttttgcatcaatgttcatgagggatattggtctgtagttctctttcttagttgtgtctttgtgtggcttgggtattaaggttattgaagcctcataaaaagagtttggtaatgacccttctgtttctattgtgtggaatactttgaggagaattggaattagctgtaccttgaatttctggtagaattctgcactgaagccatctggccctgggcttttttttggttgggagacttctgatgactgcttctatttcattaggggttataggtctatttaagttgcttatctgtttttgattcaattttggtaagtgaaatttgtccagaaaattgtccatttcctttagattttcaaattttgaggaatataggttttcgaagtatgacctgatgattctctggatttcctctgtgtctgttgttatgtgccccttttcattcctgattttattaatttgcatgttcactctctgctgtttggttagtttggataaaggtttgtctgttttgtttattttctggaagaaccaactcttcgttatattgattctttgtattgatctcctagtttccattttattgatttcagccctcaatttgattatttcctggcgtctgctcctccagggtgtattggcttttttgttttctaaagctttcggttgtgctgttaattctctagtgtgattattcgtgtgggcacttagcactttaaactttcctcttagcactgcttttaaagtgtcccacaggtttggatatgttgtgtccgaattctcattgaattctaggaaatctttcatttcttttttatttcttcctggacccaggaattgtgcaattgggtgttacttaatttccataagtttgtaggttttctgtaattcgtgttgttgttgaattctaactttaaagcatggtggtctgataagatacagagggttatttcaaattttgtacctgttgaggtttgctatgttgccaagtatgtggtcaattttagagaagattccatgtggctctgagaaggtaaattgttttgtatttggatggaatgttctatagatatctgttaagtccaattgcaccacaacttctattagttcctttgtttctttgttaagtttctgtctggtgttcctgtccagtggtgagactggggtgttgaagtctcccactataagtttggaaacacagattttttaaaaaattctttttttaaagactggtcttcgccgggcattggtggtgcacgcctttaatcccagcacttgggaagcagaggcaggcggatctctgtgagtttgaggcctgccttatctccagagccagtgccaggatagtctccaaagctgcacagagaaaccctgtctcgaaaaacaaaacaaaaacaaaacaacaacaacaaaagacatggtctttctcaccaggctatggtggtacacacctttaatcccagcacttgggaggcatgaacagatggatctctgagttcaaaggtggcctggtctacatagctagtaccagcacaaccagggatgccacacacacacacacacacacacacacacacacacacacacacacacacaaagaccttgtcttgaaaaaaaaaacctaaacaaaacaaaacaaacaaaagactctcactgtgtagctctggctgacctggaatttgctatacagaccgggctggactctgactcacagatatctgccaatctctggctcccaagtgctgggattaaaggtgtgtgtcaccatgactggttagatggattttttttttaatatgatctgagactattattgtacaaaaggaaactgagactgagattccaggatccgctagacccggaaggtcgtgaagaatctatgacatatgtggagtctttggcaatggccttgtcacccatgctgggagcctaagaagtccctgtcactgtccaactgcatcataaaaacctgtagtgagatgcttgtatagctagttgttaaatacacctctcacatgcaaggggctggatgtcatgagcactaatgaataattgtataatctgcctgtgcgggccataaaccagagtttatgctccctcttagaacattagtcgtctctctggaagatcctagtgtcaagtagggcctgcagatgccatccgtcctgacttaaagtctgatgtaaagaagttcgaagttccttcatttcttcctgctgtttcagtggggtatacttcaaatccagggttgggtgactaccacagttctcacctaagcgccgagggaattgaacacaccctgttctttgcgtttgcttcttcgtgtgtttgtttttcatagagaaacggttgtttgtgcagtggggtatggggatggatacagtttgaaattcttccctccaaaaccccacaagcatgtcattcttcgtttatccacaaggtggcacactactactttttaaaagacaatttcacagcccttagactttagaaatgcaagtgaaaaaaaatcaaagctagggaattaattagagtgcctccaccaggccaggtgccagttcgaaagagtctgtcctgacgaagattggcatgttactgggtcaagcgcataggtagaattgggtctttggttaggtacaaaccatcgctctgcctcccaaaatgagatatgccaatttagtttggctggatttgtttgggactatttctgttgttttgtttttgttttttgatagagtctcgtgtagcctgcctgggttgtctccaaactaaatatgtagccgaggatgacctacctacttctgatcccgtgactttcccctcctgagtgctagtgatcaaatccaggggtttgtacctgctagacaagcactctctgagtggagctaagccagccatccagtacacttttgtcttgggtttattatttatttatttacttacttatttattttgacacagggtttctttgtgtagctctgctgtcctggaattcattctgtagaccagactgtccttgaactcatagagatcagcctgtctcttaaatgcataatatttcatttgtttattttatttatttatttatttattgcttttttttttcaagagagggttcttctgtgtggttctggctgtcctggtcttgatctcagagatccacctgcccctgcctcatgagtgctggtattaaaagtgtatactaccactatccagctcccttatagttttgagactgcatttgaatatgtatttcacaaagaaaaataagatgtagggcaaagacaacctagaattacgcagagaggaattcatatttcctctccattcaggaaaataaatatatagatggcagacagatggatgggcagaccaacaaatggagagatggatgggtggatggatggaagaatgaaaagacacaaacaaaaggagacactgtcagagaatagtggtattaacacatttctttctttctgtcttttgttttgtttttagagacaggttttctctgtattgctttggaggctgtcctggaacttgctctggagaccaggctggcctcgaactcacagagatcctgcctgcctctgactcctgagtactgggattaaaggtgtgcaccaccacctttctacacgtgaggactccatgaatccccaaaccacacagtcaaggtcatttctctacagagataagaactgcaaggaaagatcctccaagaataaagctggaaacaaaatctaaaacaacttcaaggaagaccttgatcctgatgctggcatccccaacataaaggcccctattgtcaaccgcagcacagagcccctctttgtttaaaaaaaaaaaaaaaaaaaaagcctgcctccttaggctaccatttcaatcccagcagtccatggggtggaatctcttccctagccttctcacaaaactctacattggaggtctgtggatcttcatatagagaactgagcagttaggctgaatctcttgatatctgccctggtcactccccaggaccaaaggccaagtccagttctgcaatcctatggagatttctttcccaggctctgcccagcccaaagaggactcagaagaaacaccattcccatgcataatggccccttcattcaacaccccagtacagacagtatgtgggtggggtgacagtgactgccacatccccaaaagagcctggcagcttgagctggctcctcagagtcctctaatacaagttctgacagcagctgctgaaggagacagacagccttggtcagccacaattaccactcctccctctctctaccacacttttctccttggaggttctcacagctaccagtttgggtaatatttttacttttttaatgttataggtatgggtgttttttctgcatatatgtttatgtatcatatgcatggctggagcctacagaggccataggtgtctagattcctagaactggagttacagaccgttgtgagtcatcatacaggtgctgggaactgaactccagtcctcttgaagaacaaatactcttaagcactgagccatctctctagcccctttgagtaagattttaatgaatgaaaggatcctttaaattgcacagcaaaatatcatgttccctacagattttcaatgagaaaggaataatgatgtcacactggactcttttctggcctgtgagagataagcgtttagccaatctgctgataatcgaatacaccatgagacagccctgaaagcgacaggaagaaccaaccaaagctgtcacagagctgccagtgtggaatggcaaatttattgggacagaatgcggtttttattttttgtttccaagtacagtctgaaccacttggctagcagatcaaaggcctgcttctctaagagtgatggagttaattcccaaggaaccttaccatatctgaagggaccagctccccatttcggcagccataacagctaaacacgtgtttgtctgaccttgtcttagtcactaagaggtcagacgcctgccttgtggcaaggaaccaatgagaagttcactgatggggctatgctttacagctctgggtgtgctttacagacaagtgcacagcaatgacacgcagagcatagcaaccaccctgggagggcctatgggccataacaaccagttggccaatcaacacagggcaagccctccaagcctggaggcacatcaatcctgagcctgtgcgtacccctagacactccccttacgctgccctacaagatctctatgcagccagttcgagctgtccttctagccatccaccatggtggatggcttgaaagaccggagctaacatggggttagcttgttaaacaacaataaagccttgtgcagtttgcatcaagctttcgactccacatggtgattggggtggccgaggtcctgggcagagatcctggaagcctgagctttccgggggtcttataatcaaaactatttcttttttaatatgtatgtgtttgggtgtgtatgtatgtattgttagacccccagaaaactcaggtatccggggtcccaggccacgttctgggtcaccctaatcaccaggcggattcgagagcttgctgcaaactgcatgaggctttattgtaatttaacgagctaaccccatgttagctcaggtctttcacccacccaccatggcggatggctagaaaagacggctcctagggcctcccaaaagatcttataggacaacataaggggagtgtctatgggtacacacaggttcaggattggtgtgcctccaggcttggagggcttgccctgtgttgattggtcaactggttgttataggccctcccagggtggttgttatgctctctacatcattgctgtgtgcttgtccgtaaagcacacccagagtcataaagcatagcgccaccagctaacttctgattggttccttgtcacaaggcaggcatctgactttctagtgtctaggacaaggtcatagaagcatgtgttcggccgttatggctgccaaaagggaagctggtcccttcagtatatatgtatgtatatgagtgatttgtctccatgcacacctgaagagggcaccagatcccattatagagggttgtgagccaccatgtggttgctgggaattgaactgaactcaggacttctggaagagaagccagtgctcttaactgctgagtcatttcttcaactcccctccccccccaactatttcttaacatgggcaaaatggtttgccctggttggtgacaacttctgaactgtggcagtctctaaagaggccctagggaaggcagaagaatgtaaaagggtgctgtttcccagggaagtgaatatccatcctcaatgatagacaagagtcaggttataacatcttgttcagtgttatgaatgtaatccagaactttaataacaccttacaagtctttgcacctttcaaaagtgagattgactctgatcccaagttccaagacaataattgctgggttactggcacagttgccaagaaagactggtgaattttaagtaaagatggatttagggttaatctgtggggaaccaaaataattctgctatggaatattttgagatccagccttgggtttcactaaacaggaacactggaaagctccagcccactattgtattgttaatgccagtaaggctactattgtttaccatggcctcagggtaatatgcctcctatttgcatctctgtgggcctaagcatctgaataggcctgtacctgggatgagtaactagggaggacaggattttggggcaatcaaccagaggagagaggagaacaaagaggaaaatggttccctcgtggtattggcaggatggttaagaaacagcagaaaagatggctaaaaaagaaatgactccagttctacaacatggaactgagagctctctaaagatgacaaaatgcctgtgtttggtctttatcgccgctgggttgctagtgaaagacccgctcggaatgcttctgcatgccccctgcccctctgtctttcccgcctgtgccggtgctgggtgttctctctggagcaggcgggaggagcagttgaccgagggcagcgcggcgggactgagcagggcagggccagggttcggccaggggctggagaatgcagcgcgggcggcgcctggaaggggaacttgagctgggagagcagcggtgctgcttgtccaggagctgcgagcggggagccgcctccaaggccaaggacacgggggccgcggagctgccggggcctcccaagccttcaccccggcagggctcgcgcccccggcccgccccgcctggcaccgcgcctcggggctggggccggcacgagggcgagcaccaggtgggccggcccgagggcgagagcaccagttaggctggcccggggccccgcccccacacccccacctgatgagaaacactcagtcccaaggtctccgccccaaggtcagctatccggacacggagggaattgccacacccccacctgctgagaaacactcggtcccaaggtctccgccccaaggtcagctatccggacacggagggaattgaatctgttgtaccagacaccagaccttgagaatatgctgatctggaatggctctgtgtctcatttgaaccatccaatagaaatgattctgtatttcgcctcatttgaaagactctgtgtttcacctcatttgaataactctatacttcgcctcatttgaataaccctgtatagcgcctcatttacattgaccaatgggaatagctctgtacaatgcctcattagaattatccaatagaatccctgcttctagcttgcgcctttttccctatataaggacccctttcccttggctcggggagcttggcctcacagaagctaagtcgcccaggtacccgtatctccaataaagcctcttgcagtttgcatccaagttcgtggtctcgctgattcctgggtgcggttctccttctacgaaagtacctcttcgggggtctttcactaggaatttccaggtctacacacccccactcaggctgaacctcatgaattaaggctgagacatgctgggtcacaacacttacttcaatgggcggtggtggcacacacctttaatcccagcacttgggaggcaaaagcaggcggatctctgtgagtttaagaccagtctggtctgcaagacctagttccaggacaacctgtctcaaaaaaacaaaaaccaaaacaaaaaactgaaagacttaaaaattagcaaagaaatatagcccagaaactgaccaatgctactactatgacttagtgcctggaatttaccaaccaccagcaattactctcttacaaggccataagataactgggtaccaagaatccccagatggccaccctccctgaggggctcatgaaggaaacagattgccccaccagccaatgtgtcaataattaacaattaagggtccctatgaaacaaagagatagctaccattagttagcacatcctaaggtctgcaggttttacaactggtagggtcaggaggctatctgattcaagacaaagggcctcctaggaacccatgactcatgggttcaacagacagagagttgaggcccctctctaagcttatggtttttgcctttaaaaatgcctgtacctgggggacggggttgccctctagcctgcatgctaggagagcctgtttatacaaacgtccaccttgcattaaaacctcttgctgtttgcatcaagtttccgcctcctcatggtgattggggtggccacagtcctgggaaaagattctggaggcctgagcttcggagggggggggggttcttacaaaaaccacttacttttattttatgtgtattcatgcatgcatgtatatgtacaaaccacatgtgtttctgatgtcctcagaggtcaaaagaagacactgaatcctctggaactggagtaactagtggcagtgagccaccatgtgggtgctgggaaccgaacccaggtcctctttaagaacatccagtactcttcccagcctctaataaattctctctaatataaaaatttaaagaaggcaaatggatttcaaaaaacaactgttctgaggaacactttgagcagcattaagctggatgattgacaaccaggtctttttgtttgctgctaagaacacaaaggtcaaaagtttcataatggttaaggaaaagatgaatcacttgcccaaattcttaccaaaaccaacagtcaaatgcacttttcccagaacattaagtaaaaatacagttaaccatcaccaaagcccacatggggaaaaagatcatcaaaaggctaacaagaaacagtacttttttttttaaaggtgttttgtagatctgactattgagctcagctctaaacatgccagccaagcattctgttatggaactgtatctctagccttcgaaattttaatatttgttcactcaaagcatgaacaccaaatgtaggcaactggttaaattattaagaaaataaataagtttcctacttcttgatatgtaccacatgaagtccacctagaataaatgcttaaatatgaaagcatactcgtttctacatgcccagccatccagagtctgaggaaggaggatcacagcctgagtgagaccacatctcaaaaacacaaaagtaagtgagtaaataaatacatgtctaggtaacttttatctgtaaattataatcattgtcttagacacacaaacagttgcacacatcttaggactgcagataacaataaggggtaagattgtttctatgattcaataaaacttctccatggaaacaaaatcctaaaccctgttatatggaagttcagtgaaacaattacctgcacatctttcatgatgagacatctaatgtttggtaaatcctcataaatcaatcatttaaaatcccattaaaatgagccaatatgaatattcagtagcaaagataatagataataaagtttatgactaaatatccagtgtcggttatgggtcctcaaatccatactttgaagtctagtcccctgaagccattttgaaagcaggggtgtgggggagttggaagtgctggggattgaactcagggctttggtaggcaagctattgctccagccttcttctgtgttttattttgagacaagatctcactatgttgcacagtttcattttctttatttttgttgttattgtttgcagtgatggttgtgttagtggagttgctgttcctagtgctgttttatatctttctttcttttttgaagttctagggattgagcccaaggcctcatatgtgaatggcaaacacacacacacacacatacctaagaacaactaaataaagaaaaaagagctgtaaatttgagagagatgagaggaggggagctgcataggagggtggttagaggcaagaaacggaaaaggaaaatgatacaattataatgtaatatcaaaaactagaaaaattattagaacagactctaatccaagtacaacttctgtctttatatgagaaagaaattcagacagagggaggatcatgggaagccatggagaaaacagatactgctggccaaagagagaggcctcagcagacaccaccctgcccatcatctccagacaccaccctgccctgctcatcatctcaaatgctccacctacagagcgataaggaagtgtctgctgctgcagcactaacgaacaacgcaccctgacacaatcaaaatacacacattaagtcagcagctccaactctcagtttggcaaaaatatgaaacaaacaactatgttggcaaaggaatcacattctgtgggagtatttgtgttttgacttcaaaaatcacaccagactgagaagcccaagctggtttcagccacctgccggttaagacagagggaggcagatctctgtgagttcgagaccagcctggtctacaagagctagttccaggactgcctccaaagccacagggaaaccctgtcatgaaaaaccaaaaccaaaaaagaaaaaaaaaaaaaagattacattacaattacgggccacagcatctagttgtttccagactgttatagcagtacaaactgatatggagacagatgagaagagtcacctctccctggggcactgagcaggtgctgggcatcattaaagctccgttgttgcctcattctgaattctcttctagagggtggtgagatggccgagtgggtacaggcacttgttgccaaacctaattcccgagaaggactcatgtggccaaaagccaaaaacagttcctctgacctccacatgtgcaacatggcacacctgtacaccaatctcccaacacacacacacacacacacacacacacacacacacacacacacacacacacactaaagaaataaatgtaatttaaaatacctctattaatgttaatgataaactatttcttctcttgtttctttccttctcttctcatttttctttccttgtgttttgaggcagctccgatttgaacttgctgccacagctgcctaaatattaagattaataagtgtgcactgctgtagtgatacattatctatgatttattaaagcctgcctagggattcaggaagcaaggtcagccacgagccatagaagccaggcacacacctttaatcccagcagccagaagctaggaggtggtggtacacacctttaatactagcactcaggataaagaggtagacaaatctctgtgagtccaaggccacccaggtctacacaggagtgaatcagtctaaaagagaattacagctcacacctttaatctcaacattagggaagcatataaaacagaagcaagatctcagagaggcattcattttccagccacgctgaggagaggttacagtctgaggcttggtgagagctcgtggagacaggaccagcccattcagcctgaggtacaagtaagaagctagtggccagctgctttgcttctctgatattcagcttgaagattgaaccccagtatcagtctctgggttcattgatttatttgtgttacacactgccaggcctaggaacagcaagttctcataaatagtccttctggggtttatatccaaagatgtaggggaatggggccattgggaagctgctggactcttacagccctgtctgccttgagtcaaacagctgctaggctgcctttgtgtccacatttgccattttgaatgttccatagacaccacaaggaaatatgataatggatggtggcagctgctttctctgcctccaggactgtgtgaaacagcttacactggacttctgggtatcatatcataagtactggtgaattctaggtcatcctgtcctactcaggccaagacaggagtccttctcttggtggcccagcagagagattattgtatttggcgctaatgagacaatgccttgattggtacaatcagaagctttcatttgcatgaaagtcttgttgtggttggtgcacactggctatataaggaggctgttcagcttgcttggtgagctatctgggagacaccgcctctgttgcctgtccctggtgttgaggcaataaggcccaatagaaggcttccttggaggactgtaagagagacatactcagtctcccagtgaagtggaaaataccagagcccctgaaaaaaattgggagcatggggggaaagaagggggaggtaggagaaagaggaggggagaagaggagcagaggagcagagaggagaacttgagggagcaggaagattgagtggggagaggaatagaggagaacaagaaaagagacacatcaatagaggaagccactataggtttaaagagaaatctggcactagggaattgtacggagatccacaaggatgaccccaactaggaacctaagcaatagtggaaaggctacgttaaatgcccttctcctgtaatgagattgatgactaccctaaatgcccattttccttcagctgtgtgtgctttttgtcattaactccaatgtcacaaagatgttccttttggattatttttttcctttaaaaattatttatggggctagagaaatggctcagcagttaacactgtctgctcttccagaggtcctgagttgaaatcccagcaaccacagggtgccctcttctgtcctaaatctggtgccctcttctgtcctaaaggcatacatgcaggcaaaacactatacagaataaataaatcttttaaaaaattattcatgaaaaaggaacactcctccattgctggtgggagtgcaaacttgtaagaccactttggaaatcagtatggcggtttctcaggaaaatgggaatcagtctacctcaagatccggcaattcctctcttgggcatatacccaaagaatgcacattcatacaacaaggacatatgttcaactatgttcataagagtgttgtttgtaataaccagaacctagaagcaacctagatgcctctcgactgaagaatggatagagaaaatgtggtacatttacacaatggagtaatttacacaatttttttactcagagaaaaaaaaagcaatggaatcttgaaattcacaggcaaatggatggaactagaagaaaccatcctgagtgaggtaacccagtcacagaaatacaaacatggtatatactcactcttatatgaattttagacatagagcaaaggattactagcctacaatcctcatcaccaaaggaactaggaaacaaaaaggactctaaaagaaaaatgcatggaccccagagaatggggaggggcaggatctcctgagctaattgggagcatgagagtaggggagaggggctggcagaatgagaggaagagaagagaagtggagaggaggaaatggaggagcagaaaggttgagttgggggaagaatagaggagagcaggatgagagataccatatcagagggagccattataggtccgaggaaagatctggcactagggagatttccagagatctacaaggatgacaccaactgacaatcatgtcatcaggcaatggtggagaggctaccctaaatgcccttcccctataaatgagactgatgactactttatatgccaccctagagccctgatccagtggctgctagaagcagaggcagacacccacagctatacactgaactgaactctggaacccagtggcagagagggagaaatgaagaataaatgggttgggaacaggctggagaaacccacggaaacagctgacctgaacaagacagaacacatgggccccaaactgatgtctgggaggccagcaccggactgacccagacccctgatgtcaatgaggagacctctgcactctatggggcccctggtagtagatcagtatttatccctgatgtaagaatggactttgagagcccatcccacatggagggatgctctctcagcctggacacatgagggagggcctaggccctacccaggatgatatgaaagactttggagaacccccatggagggccttaccctccttggggagcagaggaggaatgaggtgggggggttggggggagggagagggagaagggatcaacatgtgaagtaagcttgtttctaatttgaactaataaaaataataaaaattattcatgtatgtgtgtgagggagtgtatgcaccatgcatgcatatggagctgattattacctcccaccaaggaggttctaggcatggagctcatgtcatcaggctttgaggcaagtgcctttacctgctgagccatccctccaactcctttttaaaattaattaattaattttatagtaaattgatttttctatgcattatgataagtctcccctctcccaacatctcccagatcctccccacttcccaaccacccaaacccacacccttttcctctctttcattaacatacaaacactgatagaagaagaaataaaacaaaccagaataggatcaaatgtatttaaaaaaaaagtccaaagaacatattaccagaaacacatacagatactgagaaacacatatttgtacacacagaaaacccataaaaataaaattgggaaccatagtatctaagcaaaagtttgtaaagtaaaaataaataagtgtccaggtaaaatactatatatatacatatatatacacactcatttatacattagatatagattagatagatagatacatagatagatacatagatagatacatagatagattttgctttccgttggccatctattgctggtcatctattgctgtggtgtccggtccccaatttgagtgactgaagacattcccatctttcaggaacttctaattgaagtattatcagaaacctgctacaaaaacaaaccaattccacattaaacagaataaactataccaaaagtattccctgagtgtgatggactctacatttcagttatgtagtaaagacttgggctattaaatttagaaatggtccatgtctagttaggtattgcctttcatggccagacaggaagcctagtggtggctttaaatgtgaggttttacccattgcattttctagtagctatgactcttagcaagtccctacttttccatcctttggtggcagtcctagtctttctcacttgttgtgaaacctttgtaactatagattcctagtggaatagaaaacatggatggcattttacagtagcaattgctccagaagcaaggaggcatgagagagttcctgagccctaagttacctcagcatgttctccatttcctagatctacctgctgatgaacctgctcagaagtgccccaaagtcctcctacctcaaggtcaacaatacagagcccagttcccttgttcatccaaaaaaggaaaagaaccttcaattgtgtgatcccaaataagtgagaattgtgcaagtaatgtgacctaagagctactgtcagtggccgagcagggtgaggtgataagcagtgttggggagaacaccgtcttttgctgggatttattttctgggaagatggtatttattcaacgagggtaaactgagcagcctggtgtttagtggattttcagagagttcttacaacatacagtaggattcttttccatatcatctttctgggtaagaatttaatcccaggattaaaggtcacgtaagggctgacagtaaattttgtgtgtagagagagcaaactactttgatttctcaaaggtattttccttcagtaacttctttcaatccagtattctcggaacgcatttaaccatagtgcacttttcttgtaataatttaaatatttcagaaagcatagggcgataaatatcacgctaagaaattattttcatgagagtgcttgtgagttagtgttctcaaagtggggggggggcggttcccacacaggtagatggaatcactggggagagccagactctgcctactcaatcagaaactctgatgcagtcagcagtctgggctttaattcatctcttgaagaatgacaaatgccaccctttgatactggtcccatcccccatcctccactcacccctacccttggtgctgcaaatggagcctcaggcctccagtctgctagataatcactatggcactgaactctatgcccagccccatgagccagagtctgaccacaatgctgtcagcattctgagaactctctaacttcccccttctgcttttctttttttgcccagtgaaaaaaatgatatatgcattcctaagcaacctaataccttgtattttttttaagccaatagactttaaatagttatccatgctccctaaatagatagagaggtacaaattaaaaaaaaataaaataaaatcattgtgctctttaaatatttactcatgtttccttaatagagatgggggtaaagaacaaaaaaaaaaagaaaaaaagaatttaaaccattatgttctttcctttatactgtgattcatctttctgcttttatttctttgaattcttgaagaacaatactcgtcttgctctagtgttagtgcagttataaaagacataaaaactattcaagaaagtagaaaggcctggccagtggtggcacaagactttaatcccagtactcggggggcagagttcaaggccagcctggtctacattgtaagttccagaacagccagggctgcatagagaaaacctgtctcaaaaaaaaaaaaattagaaaggggctagaagagaggggttgcccagctagagaccaagattctcttaaggcaaagacaaatccaaaaaaaaaaaaaaaaaaaaaaaccacacccaaagtagttcagcacccacatttctacgtggcttggcctttctcttcctgttcctagttccacacccagcctctatttcttctagaggaatttcagtttaaatttcactcaccagttaatacaattattgaggaaacagaaggaattatattgaagctaaagactttgtttgctttataacaaaagagtctatggttcccaagcttcacttgagttgtgctaaatgaagcaacaccaatttacatttccttaatttataatagtgggcaggaaccccgggttacaatagcatagtgttcccatagtgttttgtttaggtcaaagtccaggcttcctcttagcttggaattctactctagttggaatccataatgtggctttgtcctgaagccctggcttcttagaatcaaaagcatggggtatacgaagacacatgtgtgtaagggggtcagtccagggtgtcatggcacaggagacctgtgcagagcttcctggatctcagcttttgtagtgtggctgaatcatctggggaacagctaaaaatgccacacccaagaccatactccccatcagtagatcggaatcctggaactagaaatcaggagaacttcaacgctctcaagtaattacagtgtgcagactgttttagaagtatcagagtaacttgtaagtaaaatctcactcaccccaagctaaactgtaaacaacaattttgttcaaaacacttaatcattcatgaatggcatgtccatgacactacctatttcacaggtggggaagataagacccaaagacaatgcgatttgtatagggaaggccccagataagtactcagagagaggataaagtcctgtgctatttgtgctggttttgtcagcttaaaacagatctagacatcatctgggaagaggaccctcacttgagaaaagggcctccatcacaatgcctggagtcaagcccgcagagcattctcttgattgataactgatatggaagggcccagcccacagtgggcagtgccatccctggcctggtggtttggggatgtataagaaagcaaaagtgagccagggggaacaagtccataaacagcactcctccagggtctttgcttcagttcctgcctccaggttcctgctttgagttcctgccttaggtttcctcaatgacagactgtgaccctttcctccccaagttgcttttggttatagtatttgttacagtaatagaaaccctaaattgagacactaccttctactagcctttgttcccaataaggcctatgaagtgatgaaagcagtactattcttcgaagttccctgggacccagaaagagtttggaaattttcaatttggaaagactcatcatgtaataatttcttttcttgtctgtgtgtgtgcactcctgctgccagtgaatacattatggataagcacactctctgccaccaagatgatagccccattactatgaactcatgtttcatatttgaaaatcaatgaaactaaatgaatatggttttaaaattttattttgtttttttgttttgtttttcaagacagggtttctctgtggctttggaggctgccctagaactagctcctgtagactaggctggtcttgaactcacagagatccacctgcctctgcctcccgagtgctgggatcaaaggtgtgcaccactaccgcctggctaaaatttattttcttttattgtatgggtgttttgctcaggagctgcaggatctccatgactcagggcaatagcaggatatccaagcagagtttcagtgagggtccagtcttgatggtatagcagaagccagaggccctgaaccagaccaacaactcattgcaatgaacatttccaagtatgtttgagcaaaagcttgtatcactgtgtggcacattgcagctcccaacgtcactacaacaaatgaatatgtgatggggaggaaagaaggctggaggagtgaagtggtttatttgttttattatttgtattgttttctttgaggggaggctacaaggatggagagtggacatggtagaactgagaaatgagtgggattgggtgcatgatgtaaaattcccaaagaatcgataaaactatgttaataaaaaaataatgtctggcatggtagtgcatatccataatcccacttcttggaaggtggaggcatggggattggaagttcaaagtcatctctcctccactatgtagtgagttcaagtcagattgggctatatgagaccctgtctcaaacaagcaaaaaaaaatgcattatatggtttgggttttaaagatcaactctgcctccaagtcatccccatgtgttcaatgaatgattcacccttattccacggcggaattttggagtgtactactctttatagtctctggtttggtatgtatgaagacagaggtagggacatagtgactgggtgggaaaagggccatctctggcctctgctggtttcacagctagaaaagagaagtcagaaggcaaggaacatggatgcctagaggtgttactggtacctggggtccaggctagatatttccgggttctttgtcttttataaaaaagaaattcattccagctgactctgttccctagagggtagttttgataatgtgttagacttgccaagacctgtgaacatgacagacttatctaagtcacaggaatgctgggtcgagcacagagatgggcgacaaatggccatctagagggccaaagatagcttaagatgaactgtggctcccaacatgtaacgtaagcactggtggaagcttcaggcaagtgggttatagcaagctcaggaatcactgacataggctgcagataactggtgatgtgcttagctttgggggtgatgaaccttcaggaggatgatggtgaaggattctcccctagggatgtgtgaacctcaagtgaattacacacaacgctagagtcagggttaaagtacccttcttttggattttcctggtcccttggtaacctaggggtcttgatataggcctgtgcatgcctatgcacagggggtcgcagaccaccttcctgtccttcatagatgatacctgcttgaaggatggcattatagttaagactgctattttgagaccttctctctgtgtccctgtttttattggggccagataatgttatagagatatagcatgatgcttttccttagggtatcttggtcaaactcttgctcatgtttaagtctggggaaagtctggtagaactgagtgtaggttcccatataacctgcaatggagaggaggggggaaatggagaacttttgacctgagtcctcctaaaggacatcccttccagaagagagagtgaggtatagattctcagggcacacacacacacacacacacacacacacacacacacacacacacacacacacacactctccatgggttacctacttaggccactgaacaccttaactctcagtttagatggacaccaactgatgtcactttcttatgtaagcctcagatctgacgtaggttcccccatgacctacaagccctttctagtagtagtgctttcaaattaattatgatgagtatctgttctatgtatttggggtcctgtatgcaaacataactagaattccttaactgatgtaaaacaagcagtcacttccccacgcggacagagactgacctgtgaagttaaccttctgggcctagagaacaatgggattagcagtgagggcacacaagctctcagggtcattggcaggaatgttgttctcttccaagttaacaaagtgaagcataggaggatcaggaacatacataagcctagtatgtctccttggtaacagatatggtcaacagagacagcataacaaggagcagcaattctgcagtcacacccttccccaagtcttttctcttagtcacttctctttttttttttttttttttttttttttttttgtttttgttttttccagacggggtctctctgtgtagctttggagcctatcctggcactcgctaccaggctggcctcgaactcacagagatccgcctgcctctgccccccccccagtctttacctgagtcattgttggtaggcagactcagttcttcatggttcaacaactctgcctctccgttctcttccttttctttaggtgtagcttctgcagatgctttggaagttcttcatccttccacaggttcggtcagtctttcagatatccacaatggtttttcagcatcatgaggaaaaccacaaacatagccttgggctccagggaactactggatccagctgtccactgatgtgatatctctccaaaaaaaccttgaccttgaatttttcagagctgcatccccccccccaaaacaaatgttctgctgcagtgaggcaatccttgtctaaattttaaaaatttaaagtccatataataaaagataaaatattgtgaggagtacccatattgctttctcctcctataccttgaaataacaattaagctgttcattagctcttttcataaatgactgaccctgagggatatacagaatgcctgtgatgtaggttatatcaaactgctggcaaattttctgaaaaggtttggcaatgtatgtatgagcatagtcagtttttaatattttgtaggaacctttttgttttgttttgtctttcaagacagagtttctcagtgtagccctggctgtcctggaactttttctgtagatcaagctggccatgaactcacagacatctgcctgcctgtgcctcctgagtgctggaattaaagatgtgtgctaccactgcccagcttataggagacttttaaaagggcaaaagttgagtaaaaaggtaataacatccttaattgctctttctgataggggaacagtaaaattgaacaacgaataaatgtccacaatgatgtgaacacatttcagtctcctaaagctaggagcatgggaacatccatgtgccaaatatgatttggcaataatccttggggagtcatgtcacaagagggtagaggcatacaagaaggacatttcttaactattacatgaacttgctcattagttagtgaaaaatgtttttggttttttttttatggtgaagcattttgacaaaagcatgcattcgattttcataggtttttttttttttcttattttttgtttggttggttgggcttttttggttgttagtttctaggataggagacagtgttaaaaaagaatctactattgagataccttcagacaaaggtcctggaagtttagaatgtaacctaatatgatcaaaataaactggatttttttgagttgtaatttctgttgaattaatagtagtacgtcatgtatagagatgtctgatgaattggtccactgtttttaaacattgctatgactgtatattgtgaatcagagtataagtttagaggttgggggtgacatgtaaagcaatgtaaatcatgtataattctatctgttgtacagaagctcctgggtgggtaaaaatcagtgaagcatctccagaaaccagagcatcctcactatcttttatggcatctacaaatactacttgtgcagagagcattggctgaagcatagtgcttttaggaaatagcattttttatgcaaagtcagtaagtttattggaaggaaaatgattataaatttaaaaggaatatacagcaaaagccaatgctaagtcacctgaagtattcattaaaaaatgtaactgtttttttttcataaggaataaaaatttttttgaccaaataattgttttttttttccaagacctacccagaaattatcaattcagcaaccataaaccaatatagattgataaccttttttggactaatagatatatccattctattggccccttatcccagaacaaccctgtagggctgctgggagaagggatgaccaacactgtaggaacagtataggaatatgaaatttgctgacgttggcattcctaagtacatttttacctttacagtcaagttccgtccattgtttaagagatgaaggatcaggagtcgtaaagaatagcaaataaaggttgtaactgtgatgagatttttttttttttttgagacagggtttctctgtgtagctctggctgccctagaactttctctgtagaccaggttggcctcaaactcacaggaattctcctgcttcttcctccttcctccctgcctgctgggatcaaaggcatgtgccaccacctcccagttaagggaattttttaaaagattttatttatttattatgtatgcaaacaatctgcttccatgtatatctgcacaccagaagagagcaacagatctcataacggatggttgtgagccaccatgtggttgctgggaattgaacttagtacctctgaaagagcagctggtgctcttaacctctgagccatctctccagcccccagctaaagaaaattttaacttgtgtctagcccaattcaagtcccctagtagtttttggaaatcatttaaagtttttaagatgtcttttttaattcctttgaggaatgattactgaagatttatcaattttttccagatataagattggaatagtatgttgaatttttttaggtactataatcaatccacaatgggttactcaatttttacttcagcaagtaaatctccttgaatttcattatttttatcagaaagcagaatatcatacatataatatataataaaatcagaaggaaaccactctggagctctctttacagcagtaacaacaaatttttggcataaagttggctctttgccatttcttggggcacaagttttcaatgatatcttttcattggcccagataagagaaggtacactaaaagcaaatcttttataatctctaggatgcaaagatacagtatagaaactattctttaaagccagcactataataagccattccttaggaacagtaacaggtattggaagttctggttgtaaaggtcctattaattccatggcagtgtttattcagtgtagatgctatagcaaatgatattttccagaccattttataatcacaaaaataggaaaattccatggactgttagattcttctatatgtcctgtttttggttgtcttaagactaacacctgggatgctactatcttttcttttctaaggggccactgatccttagaaatcctcagaaagccaagttataggatcagcattatacttttcagcagcccctaggaaaagtacccaaaccttttttttattacattttgaaatgggatttaaaggctcagttattccctgtaactcctttttttttagaccccttccaggttccttcctgtgagagcatcacctgtccaacaggtgcattaggaccaaagagacacatgcctaggagcagctcttccccataagttaactgtcaacccttgtaacacataaagctggaaggaactgactaaccatcatcagtttttaactaagaacttttgaactttgttttggcctttgggaaactcctactccttggaactctgtttgggtgccttgggaggaaagaaccaaaacatcagcaccagtatccaaatttcttaccatctatccatacaggcatgctctaagttattcagctcagtaatagatgaagaggagcagggaaaagagttgccatgttatcaagaactgcacttgatggacaggtttcaggggtggaggaaagtgaagctggagctgggggagcaaaatcaacacaagaaggaggaaaaccctcagcctcttcacagagggagaccttaggtaatatggctgcagggagacgctagataatatggcttcagggtctaagtttctttctacttccagtgttagttctgcttttgtctggtcactttcatttttaattttagccgtgccatttttatctattgctgtttttatttttctctaaagctgaaagcatcagcaggatttttttttctggtccccattgcctctaattctccctgaattgctttgctcttcctgtgacggagttcggagaaagaaggctgacactccttaatcaaccccaggaacttcatcacctggtcatgtcctgctttagctccttctgccagcatgaaagtctacagaacttctaaacacaaatgtttctccttccaccctgtctactccatctttttaccaccaatgaatcttcctgccttattatatgtgtgcacacacaatttctaggagttcttgctttgaaccttttttccttggtgttttttttcgggggggtggggtggggttgagacagggtttctctgtggctttggaggctgtcctagaactagctcttgtagaccaagctggtctcaaactcacagagatccacctgcctctgcctcccaagtgctgggatttgttttaaatccccatatttctgctctctgttccaggctccacctgtaagtgcccatgcttacttaccaggccaaggtcacctgatatggccatgaggaattaaatcaccctgattggaagagacacagcactacagaggctgtgatgattttatttatatctttatcagaaacagactataatgacaactgccaggatcgctacagttgtagataccaggaataagtgaagtttgcaagtcatacagggtacacaagattaatgtctaagaatgcttgtcctgtcaactcttcatgcttccttgactactaagggaacatacagaaaaacacacagtgacttcaatgtgccactccctaggggagtgcaggggtctctcagtaactggaaggcacactgtgccctaggaaccatgaactctaacctgaaaaaaacctatgacacacgcctgtagggggaaatgctgaccaccccggcttgggggctggcaccagtgatgcatgcattctacgcccactcacaaaggaaagggaagtgttttgtttttatcttcacaggaaaactcacctccagaactcaaaagacactgcgtgtgtagatacctaaagaagacaacatagttatacccatcaaacaaaagtaatgtgccatatggtcaaatatatatatatatatatatatatatatatatatatatattccttattcaattaaatcaatgctggcttagagttggatttggctttcctcctctaaatccaagcacattgttaaaatgaacttcagagtttctgtattgtatcaagaagacaattgatgtaatacagaataggaaaaatattggggactgtcatttatcttttcttggctctttctctcaaggtatacattccctcaaaattgctgttttctcattgttgcctttcccagtatgcatacatatacaagtaaaagcagttatggcacacacttttaatcccaacactcgggagacagaggaaggtagatctctgtgagttcaaggccagcgtggtctacagagctacatccaggacaaccagaactacacaaagaaaccctgtcttacaaaacaaacagacaaacaaacagaaaaactgaaagaaaaaagaaactgtaaaatcagggaggggagtacataacccaaaccaagcagaatcctgggttactaacccagtcctaggcttgcctgcccaacatgtctgtaaaagacaacaatttcccctggggcctccagaatgatgcagcctgacatcttgactttagcccagggagccttttccacatttggcctaccaaaaggaaagatagtaaatgtgtggtgtttaaactcaggacacctttagtaattcactaaagcatcagataggaacaaatgaagtgctttctcctttactggaaggaataaaggagaaatgaacatgacccttacaccacagagggtgtaatcatttattagtcagctcctttattcactaatcaaatgttattgagcgtcttttttttttccttttcttttccttttccttatttttatgacagaagatctcatgcagcccaaactggccttgaattcactgagaatgtcctaggatgtctttgtactcctcatatctaacctagacctcagaagtgctgtgattataggcatgtgttactgcacccagccgagattccatcttaagtagagaatatttatagatgttggtgataaaagagcaaagaagacttcaaagattctaaagcagtgttggcgatatagctcagcagtagtgcaaatgtttctcaagccctgccaaaacaaacaaacaaacaaacaaaacaaaacaaaacaaaacaaaaaaactaggcctgtagaggctgagattcacaaccaaaatgacaaaaatcgaaacaaacaaaaatacggccaggatgtgactctgctggcaagtcagctgagtgtggagaaggggagaccagtcttactgaaaatgttgggtgtgagcaactgcatggatggatggagatatggggaaggaaaggattaggatagctgttggacacactcatctgagatgattaacttccaacactggaaatacaagcctggactcaaagggtagtgtagttgcaatttctaaaaggataatgtagttgtactttcttgttgggacctccagcctgcaaataatgacacagagacttttttttttaaaaaaaaaatatttatttattatgtatacagtgttctgcctgcacaccagaagagggcaccggatctcattatagatggttgagagccaccatgtggttcctgggaattgaactcaggacctctggaagagcaaccagtgctcttaacctctgagccatctctccagctccagacacagaaacttactattaattataaaaggttgaaaaaaaacccaaaaaacaaacaaacaaacaaaaaaatagcacttgggagacagaggcaggtggatctctgtgagtttgaggccagcctggtctacagagttagtgccaggacaggctccaaagcaatactcctgctccagcagcacaatgtgagccaccagcaaggagggacgccaataaggcatccgataagataagtcttataaaatatatagatttatgataattaagactgagctaacagatgagaaatcctagtcattggccaagcagctttgaacctaatacaagtctctgtgtattcatttgggcctaactcgggcggtcggctggcttaaagctcacacgtggcagtggggctcagagcaagggggagcttcagactccagactgactgctgaggaacctgaataagattgaactaggccctctgaacatgggtgtcagttaggagtcctgggcagtctatagggcctctggcagtggaaccagtatttatccctagtgcacgaagaggttttgggagcccattccctatggagggatactctctcagcctagatactaggccctccccaaaatgatgtgacagactttgatgatcccccttgggaggcctcaccctccctgaggagtagatgggggtgggatggggggagattagtggggggcataggaggctggaagggagagggaactgggattgatatgtaaaataagattgtttctaatttaaaataaaaaaacaataaaatcaggacaaataccatcccaatgcctgggctttgctgaagaataaaagaataaaaaagaattatcaagtaagaattacatttgtaatgtccagtccatttgtatttggcaaatttggagaaattattttattatctactctatcttaatgaatacaacactttatacctaaactgctttttatcataacttgtattaacatcctaaaaatattcttttagaccttaaaacattttgttagataaacaacttaaacttttatgtctgtcaatgtttataaactttgcatgtcttttgtaagtttttttttttaatttggtaacaaaggaaacagtacaactatctagtcttcaacccccatcagagtcctgagaagaatatagtattacctgagtgaacaggaagtacagaatagcagcttccaaaactatagaaataacagaaacagctggctgcctggacagttacccaagattcctttgcaaaattggtgcatccatctttggcctaaaagtctagtatacctgataggcttttctgggaagcaggaatttttgaaggcctgccttaccttgtctaggcaaaatttggcaatcactttcttttgtgtcctccttgtccaggtgagacaatattctgtcagcagtttctcgcccaaatggctagctttgctacattgaaagcaactccatatggaggttcttcaatgccaatcatccttttttgaagtaaattggtgctggcaggagcagatgtgtctcattgtcataaaaagctttatgttattaagacattttagatgtcatatcctgtaggtctctgaagtgtttgaagaccatctatttaaaatatatctgtttgaccttgaaaacatacctaacacgattataagttaacctgtcttcctttatcatcctaaatacttttcaaggactaaaattttgtattacatttttttaatgagctacacaggtacaataccttttgttgttgttgttcttttgtctctgtgtagctttggagcctatcctggcactcactctgtagaccaggctggcctcacactcacagagatccacctgcctctgcctctcaagtgctggaattaaaggcatgtgacaccactgtctggctaggtacaataccttaaataagaatagaaacacatatacaatataacaaaaataaccttaaatttgtatcaatattcaaaagtccataccaatataaaatatttaagactagtggttgctttttagtctaaaaacagattcaataatctaccctttcattctaacctttccatatcccccttttttcttatcggaaagcgattctagaatctaatctcctttgcttagtttcttctcttaccatgaccagtaacaacttgcaaacaactcccttaaacaacgacaaacatgtataatccatccaactcccaaaccacacatccctacctcttgggattgtgggcatcatgtcttctagactgcttcatgttgtctgggggcaatggcatttttaagggactttgaaaaaatgggataatggtaaagtcctgggagagctggttgtactatttcttgtttagtgtctatgtgatgggaaagtgtagagcttatctgaaatcttgtctggagtagtctgtaaggctggaccacctcaactagcagctttgaagttgttatgctgtagagttttgaggaaaatgtaacagaggcattctgagagggtggatcacctgggctactagtatttattggcatttggtccttttttcctgaaaacacataaacttttaaaggtaacatatatatctgggttaacacaggtatggaatatacagtatgcataagtcagctaaatttagaggattcctttttgtactacgtttgcatagataaaaggcatttgtcaactttagaagttcatttggaaggcatatccaaactaataagtcacgaggattcggtaaccaacaagattcataatgttttacccagtcttagatcttttcccatgcagagggaccaacatacatatcatctgtcctgtagcctttcttggacttttttttttttttctgtagccaagatcctcagaaggtctcccctggtcaaatgtgatctttattcattgtgtccctttgactacctgcttaacccagattgtatcaccagtcttgaacaaggggaaaccaaaggtggacttggaggttggctgagtctctcagatagtctgataaatagcctttacggagagctggagggcctgtggtgacatgagaaatgaatggttagagagttttgtcaagtgctagtctctgagctgaggaaaaagtgagggaggtcttgtaaacataatctcatgggggtaaatccctctctatattcagagcagtgggcccaaagcgaaacaaagcagatcaaaggaagaggggcctatccatcctttactaatgagagttttgttagccttttttttatgtctttgtttgtttgtttgtttgttttttcattagattagctttagctgccacagctcttagacaagtgggccatcctgtgattacagggatcaatcatgtggacatgtatatcacatggcattttcatgacctcaaattttgggttaaaaccccttttggaatgtcttttgtggacaaacagatgaaaaggttttgagatatctagaagtggtagggctggagcccaagtcagagctgtttttaaagcctcaacttcctttttttttttttttttttagtctcaatccagattaggggctcagtgtccccctttgtgctggtgtatagaggtcttgctatttccacaaagactggtatccagaggcagtagtacttagccacacctagaaactctcaaacctgcctcttagtctttggagttggggtttgaagaatgccctcaatcctattccgatgctggcacctcagttgaggctaattcgggtagcctctaatgtaccaagttgggcttcttttttttttttttgagacaggttttctctgtgtagccccagctgtcctggaactcattctgtaaaccaggctggcctcgaactcaaagatccgcttgcctctgccccctgagttttgggattaaaggcgtgctctatcactgcctggcaagttgggctttcttagtcaccattctgtagcccactttgtgtctctgcagcagtccctcagtggcccttttataatttatttagcttcagggattaagaggaggtcatttacatattgtaagggtatggtcccaagaaacctttgatggaagggctggaggtcagcatttagtgtctcatcaaacagggttggagcattttgaaatctttggagcaacctggtacaggtaaagtctccactacaacctccctttgttaaaaaacaaagatgagttgactcgtctctgccaatgggagctgaggaatgcacctgtcaaatccaagacagtgtacacctgtttctctaaaagagtcaggctcataagaatcagaggttccaggtttctccacagacaggagaggtgtattccagggtgactggcagggcaccaggatttctgtctctccaaactaggcaatatggactgcaatttcacgttttgtttccagggtcattgggtattgcttaatctgaacagaagtagctgaactggttagttgaaaaattataggaacgtagtgttcagccagtcctggcgtggggtggtttctgccccctccctgggaatctttattgcaaatctgagagataattcaagtgtatcttttgactgggggcaggattttgagttaggcaatattcttctcacagagggcaagacactaaaattgtgttggatatctatctgtaagtctaactgcatgtcatcatcagagaaggtaacagtggttttcattttatgcaaaaagtctagtctctcaattggttttctgttgttaaacaccttttgaactacttccagcaactgcaacctgtttatatttctaaacgttttaagcttacatatttttttttctagtatctgtggtcagctgggtgacaaaggaaatctttttagcagttgtttttaatctttctaagaagaacctagcaaaaaaggtttcaagtctccttggtcaatgttggacaaaagggaaaactcgttctatccaggctgagttgtccagcagcaatccctccatctgggagtgggaggagaagggaagggatggttactactctccttttttctttttcttttttctttctttctttctttttttttaagagaatggtgttccagttatattgatcattggttgaaaaggagacataaatcatgaaagaggagaaagagtaatttcatttttccctctccctgcagagagggaaaatgttgttagagcaggtggggaagaagagggaatgttcccaggtaactatttcccctccctccctgtgtgcactccattcaggtgagaggcttggttcctcctcctccacgagggaacctgatctcaaagggaattaagtgatggaacaagcaagcactctgggattaggacaggagacccctggtatttccaggtcttgtctcagggatcttggtgggacctccagaaatgagggttatccaccagagaagactactcaggcactggtttaagccaatggaatatcgttttttagacagctggtgagtacaccatatcctgggttgacatatttagctaacaaaaacagttaaccgggatcagaactacagaagcccaaaagcaaggttagtgcatttacagactgtggtggtttgaaagaaaatggccccaaagggagtagcacaattaggtgtggccttgttggaggaagtatgttacttactgtggggtgggctttgaggtctcttttgcttaaagcttccctcagtgtgacagtcagtcgactttgtgttgcctgtaagatgtaggactattcctccagcactgcatcagcctgaatgtcaccatgctcccggtcatgatgataatggactaagcctcttaaactgtaagctgccacctcaagtaaatgttttccttagtaagagttgtcatggtcatggtgtctctccatagcaaaagaaaccctaactaagacagggactttctcagaactatggactttgatggattaagtgtttgtttttgctttggcaggtgatattgtctatgtgatgagatttatggcttgcatggtacttctatcatggagtcagttatgctaaagtctgggagcctattaaaagaggggctgaaacaacagttcagataaaagccctaggagttgatgggggcagactcccatattccttccattaagtcctggccagaggcagtggcactcaagaggcagaggcagaaggagctgcatgagttcaagaccttcctgatctacacagaaagttccagagaacagatacagacaagtcttttgtattccttcacaacttcatatgtatataattttaacattttaaagatgtgtgtgtatgtgtgtgatgtgtacaagtgttcagaggccagaagagagtgttgagccctggagttacaggtggttttgcgtggcctgacatggggactgggaactgaatgtaggtcttctggaagtaggcctggtgtatttaataatttttaataatatttgaccatatttatctttctttttcctctcttatccccattctactcccacaaaatcccttcttcttcacaatccccaataacatacacacacacacacacacacacacacacacacacacagaggcatgcacatatacacatgtacacacacacagaagcatgcacatataaacatgcacacacacagaagcaagcacataatcacttgtacacacacataccaaggcatgaacatgtatgtatacatatagaggcatgcatacatacatacacacataacagcatgtacatctatacatgtacacacacagaagcatgcacgtatacacatataaatacacatacagaagcatgcacatgtacacatgtatacacatataccgaggcatgcacatacacacacagaggcaggcacacatgagtcacatgaattttttttttttttacagattttcagattctttcagatactttgttcttcttaccaggagacttctgcctttggacctctctgttttgttctggagaccccaaaatacacctgccaagaataaggaaggctgcttgcctcttccactgaccacagccagagggagtccaggcggagtcagtactctggaaagcaaggctggatatgctgaacaatgcacacttgtgttgttaggagtcattgaatactcatctcaccctagggacaaagttaggcagatgtgacagaaacggtgtagaccatagaccacagttcaacacactacagagtcctttctaggaaggggaagctctgctgaaaaaaaaaaaaaaaaaaaaaaaaaacagaggacaggggaagtggttaaggagctcaagaaagcaagtttcagtgggtgtggtggagcatacctttaattccagcacctgggagacagaaataggagggtctttgtgagttctaggacaacctggtttacatgagttccaggacagccaggactacagaaagagagagagggagagagagagacagagaaagaaagggaaggaagaagggagggagggaggaaggaaggaaggaaggaaggaaggaaggaaggaaggaaggaaagaagaaggaaggaaggaagttgggtcaccagctcacaaacaacaacataaagacttattattaactatgaaagcttggcctcagcttaagctttccctcaactagctcttataattaaatttaccagtttctattaatctacattctgccgtgtggctcacctctcctctgtactggatccgacttcttcagtgtcttgctggcatctctcatgtgcctagattcatcctgagcttctctctctgcttagaaatcctgcttattctctcctgcctagctgttggctgttcaactctttattaaaccaatcagagggcaccttgacaaagacacattttcaccgtgtacaaaaagattatcccacaacaaaataaagaaaaaggaaggaaggaaggatggaaggaaggaaagaaggaaggctgactactcagatgctggtttaagccaaaagaatatctttattagccagctggtgactacactgaatgattgggatcccattgtagctccaaacctttctcagggtgagcttttaagcacaaaaaacatatactgggttgatggggaatgtactgtgtatgtttatcttattgcctgttaaataaaatactgtttggccaatgagacagcaagttagacaggactaggagtcaaagaggattctgggaaatgtagtagagaagtggtgatccaggcaggaagtgacatagcaaggagactcatatttaaagaaggagaaacaggaagggtcccttttccccttgctcctctagcagcacaatgtgatccaccagcaatgagggactccagtaaggtgtccaataagtcttataaaatatatagatttatgataattaagcctgagctagcagatgaagaatcctagtcattggccaagcagctttgaacctaatacaagtttctgtgtatttatttgggccctaactcaggcaggcggctggtgtaaagctcacacgtggcagtggggctcagtcggcttttggcagaaagatttattgtaacagaatggtgtcagaagtgggattggttggcatattttttttaagatttttttttattttttattttttggtttttcgagacagggtttctctgtgtagctttggagcctatcctggcacttgctctggagaccaggctggcctcgaactcacagagatctgcctgtctctgcctccccagtgctaggattaaaggcatgtgccaccaatgtcgggctaaagatttatttttttaatgtggtattttgccggcatatatgtctgtgtgaaggtgtcagatcccctggaactggagttacagacagttgtgagttgtcatgcaggtgctaggaattgaaacctgatcctctggaagagcagccagcactctgaaccactaagccagggtgctgcctactggcttgctcccatgagacttgcttagcctgctttgctatagaacccaagaccaccaggctaggggtgatcccacccacaatcggctgtgtagtgagatatccacccagcccacacctgtagcactgaacatacacttttgggtggtcacaggtgcagacatgacggagggtagcactagatctggggtccaagaccccagggcgctcttttgattccggtgggtcacagagaacagcctgagtggatccttggagcttgaacctgcgatgatcaccggcgtcttttgtaagtgcattctccccaaataaacttcacttaaccggtactgagtctagtgaatcctgattcccacacaatagggttggaccctcccatgcccacccatatcaatcaccaattaagaaaatgtcctacatgctgtttctggctctttcgattgcttttgtgacccctttccctactgggttgccttaaccagccttaatattagtgcttgtgacttgtcttaccaaaacttgatattccgtgtttggctgatatccccggatggacctagggtagataggaagtagagaggaaggactgagaggacaggagggagaggaaactgatcagatgtaatatatgagagaagaagaattaaaaagaaaaaaagaaagaaaatgccctacaatcttgcctacagctggattttatagacacattttttttttatcttgaggctccctcctctcagatgactctagctcgtgtctagctgacataagaactagccaggacacaaaagcaaaaccatttctactaggtaaataatcttatctagtaaaattgctctgcattacttctggtatcttcatattgcttgatgagagtgtatttgctatacctgacaccagcagagggcgcccttgccacatgtcacgctccagtttgatcacctcttgttttgttttgttttgttttgtttgtttttcgagacaaacaaagggtttctctgtggctttggaggctgtcctggaactagctcttgtagaccaggctggtcttgaactcacagagatccgcctgcctctgcctcccaggtgctgggatcagtttggtcactttttaaacaattactattgttgatcactttgttccctcagcccaagaattcttctttttaaaacaccggtaagtctgcatggctcttctgtctcctttaaaataaagattttatttgtgtgtgtgagtgcacgtgcaccctcaggaactgggggtgggtgggtgggtgaagacattctggagttacaagtagttgtgatgagggtgcctgatggatgctaaatgacataggtgcctggctggcccctgtggggtcagaagagggacagctgtgtcacacacccatattcctggcactcaggaggctgacacaggaagactgtgagttcaattcaagtccaatctgagtttacgctccacccgcgccccccaagcaacaataaacccggcacataaccttttgtcttaacctcaacataaatcctaagggagtgatccacattgatttgttaaccagtttcttgctgagtagtccgctgtagacacgacaattcgttcatctttgctggtgaagacccttttgacatggacatctatgttcttactaccataaatttgattcttttggggagagtataacaaagttagctatggattatttactaatttggtgttttccaaatggaaatatcctttctaaagaatgtgggagatgctggtcagtcatgtctcacacctttaatcccagcagaggcagagatgtgaggcagtggatttctgagttcaaggccagcctggtctacagagcaagttccaggacagccaaccctgtctcataaaaccaccaacaacaactacaataataaataatagtaaaataataataacgtgaaagagatatgagtatgctacctgcaaaaaccactgctttcgaaggaggataatttgaactggaagcaaataagaaataacaatgaaacctgtgctccctctttctgctcaaaaccaaaacctcagcttctcttcataaagctgagccctttctagggccaggaggggcttgtagcccagctgggaaaccagaaagaaaccctttcttcttcctccaaatgatagtggggggggggggggaggtggagccctgtgtatttgctttatgaaacacaccagatgtagaatgaaagaatcctccaaaatgggtcagtcccatatctttaatgagaagcaggcagatatctgtaagttcaaggtctacagagtgagtcccaggccaatcaagactgcacagcgagacccagtctcagacaggaaaaaaatccccagaaatgattagtcttctgccagttacatccttccttcttcatggtcattgacacaactgcaactccaagcggtaagcccaaatccggtgattgaaggtagagactacttcatgatgtcttatagttatagaacaaagggaagtcataaatccaggcattttccagatatgttggtggacagatcacagagtctggctacagcaaatgggaattcaggctacagctctcagagccacctggtggctcttagtgtgggggttgatggaacacgtgctttcctgtagctaaaatgatgagtcagacacagaggtggacagtgagcgagtactttggatctagacctgcaacattccaactctgtgcagtcacaagttctcttcagtcagtctccagtagaatctttaacatgggagtggttgtgctgggagcgtcatcccacctgggtaatgatctatcacacacctctcttgctccttcctcctttctgtccaaggtcattgaccactttaacatctcagagcagcttagatgtctgcctggagcaaataaggatctcacaggctccccaggaacccttcaggtgttgtccctgcaaataatctgaacctccatttgagggtgtgtggccaagtgtcttaaaagtatctataattaagacaagaagaagtaatagaagtgccctaaagcccagaaggggtagtgcacacacctggaatcccagaactcaggaggctgaggccaggggctcacaggtttaaagccaacttgagctacagagtgagctcaaaggcagcctgggatatgggctacactgtaaaagcaaaacaaacagtaagaaacattagtttttgcatgtacgtacaagccaacgagaaaggcctaataagaaatgcttactgctgattccttgattgtggacttctagcctcaagaattttgaggacaccatgaggcctgacagcagaggtgggggtaggggggctggaatcttggcatttccaggtctgagacagacagattttgaggactgcttaggaagtccctgaccagcttggctacatagagaaaccctgtcttagaaaacaaagagtgctgggcatttgcctcagctgtagagcacttgcccagcatgcacaagttactgattccatcctgggcagaagcaacaacaggaggagttgtgagaaaatacattcctgttgtaggagtcatgtaatctgggatgttccagctctagcaaactcaaacagcagaagaaacatacacctcgttggtgcttgtaaactgctatactctagcaggttcaaaaggcccaactgagcctgagattgtacagctcatgattttgttgtttccttcattttttttttttttcaggatcttgctatttagcacaggctgtgtagcacaggctgatccctctcctgatccctctgccagaggctatcagggcataccccataatttctatagctacacacttccttgtagcacacctttgcaacccataaacaatgaactcattaacagatcaaaatgatgaatcctctcacaaataacagttacactgttattccacctgacctagaaatagtccttgtagttaatgagtatccattagctaaattgattttgtataagtttttggtttgttgtttgtttgtttttgttgttgtttctttttgttgtagtaggtgctagagaaaatatattgccttgagccatgctcccaaacccccaaggtttttaaaataactagtggccttagataccttcaagttgatttgttgcaatatgtaattgctgttgaaacgaagcccgtcagcatagttatcctgttatagttaacaaatatatattttcttaatattttctctctgtttttcacattcttttctctgtgatggatgtaatttgggactggatgtttaagttcttgcttgaattcccctcagtgatggtgtaagagaaatcaatccgctcttcccctaagttgcttttcgttttttgttttgtcatgatgacagagaggaaacgagaacagcatggtgaactttccgggatcttgtgatcagggactgtgatttggaaagcttgggagtgttttgtaaaattgtgtacaaaagagtttttttgtttgtttgttttgttttgtctttaaagagctaaaaattcttagccaggaggttgtggcacattcttttaatcccagcacttgggaggcagagtcaggagactctgagttcaaggccaggacagccagggttacagagagaacagagcaaccctgtctcaaaaaaacaaagaaacctcttaagacctctcctttcaaggcctcaccatccaggggaagcagaaaggatagggttttagttgggggggggggtaggggaggacgggagggacaagggaactgggattgtcatgtaaaacaatcttgtttctaattcaaataaaaaaaatattaaaaaaaaagacctcccttttctttctctctgttcctttgaacaggagccatgaacaagagtagggaggaccagtcccagcaagtgacttcggaaggagataagactagacagtggctaagaagaggcttttcccgtgggcaaaacagtgtaaggcttggaagagagcttagattgaagtatggtccagtaaagcattttcactgcttcaatgagtgggggatataggaacgagctcattgtttatgagaataggaatgtgaagtctgtgtgaggccttcatcagtaagcaatgggttacctatcagtcttacctaagtcacttgaggaccagcgaatctctgcctgagatgatttctttagtcttcactgctttcaggagggcagagatgggtcacattccacattgctcctgaggagagcacacagggacgctctgagatgctctagagctgtggcagtcagcttgtgcaaagccttgagttattttacacagcacccattttgacctaagttataccattatgatcatcaatgccaaggtagaatgactacaccttgtttatacaagtacccaggtgccatctgccagcacaccctgagcctcgatctgataaataatttatctgtgctgataaataattacactagagaatatgttgattcatatcagaagccccagacagacaagcttctcaatcacaccagatgtatccctcaccgtaaaaggagcaccccaagactgagacatagcaagcacactaacatcacctgggtcacttatgagctttatccaggataactgccacagcaaaggaactctgttcacccctggactctagttagagcatggtttctcctgtacaacctatccaggctggcccacaaaaactgctgccaccagatctgcacgcattgacacccctgtgccctggtttgcaaagcttaaatgattctctgcagaaaaatgtgcttgtatctctaccagctctctgcctcctccttcaacacagcctctctgatgccttagccacacacaactgtgtgatcttgtaaaaaaaaaaaaatcaagcaaacaaatgacagggctaaaatgaatgttatggctagaatggcaaagttgaggaaagtaaatattagggcttgcagctggctatgaggtagtcaatccaactgaaaaaagaggaaggacagggatctgagaaaacaacaacaacaacaacaaaaaacccaaaatcagttttggtcttggtaggcccgagccatcaaggaacaccccacccccaacctcccgggcccaagaagtctgcaaggcacggctacctttttctctagtgcttctcaactttttgtcaagttacacttttaaacacattcttgcatttaatgcatataattataacagactgaattatgggtaagggcagcttctaagaaagccattgctccttccaggaaggaaaccactgcaggttatcccagcggtaggctaagggaggagacagagttgcccaagagtcacgagtcctgatgtcaggcatccctttgctattgcactcttagagccgcccttccccttccctctggagggtgcacttgcgtgctcacctgctgaaggaagccttgcttactgaaaagtttctgcatccataagcctctctgttgacgaagtaatccaaatcaaaccaaattagaaaaaaagtcttttaaaatagtctggcagctcactcttctgcactgtcctggaaagaaaaagtatgtttcctctagacattgatggttcaaaacaaacttaaactacttgaggtaaacctaggaagagcaaatcagttctgtaaagatggagcaaaccatttattctcatgaaaacaaatgacaggcttagtttcaaacatcacattgtgacatttcacaatgcattgtgaggcttcgtggtgcatttacttttacaatgactttaccaaaggacttttaaaatgttactttgtccgttagtaaagggacaagtgtattgggatagatggaggagagaaattgttgtcgctgttttctagatggaacaaaatgcaaactcagtatggagaggcagatacttgccacacttttgttttcatgacaaaaaacaaaagcctcagttaagaaagggctcatgttctctctatgttctaatctaggcacaccatgcctgataacaggagctggaaaggtggctgtgctttcagaggatctcagttcaattccttccacccacatggccactcacaatcagatttagctccagtttgagagcattgatgcccttttctggcctcagagggcactgcacatatatattgcatatacatacctgtaggcaaaacatccatccatacaaaataacaatagaattaaacttttaaatagtgcatgataacgttacccttctgcataaaattaaagcgagggattctaagactgtcactggaggggaaatccctaagggaaaggggtcgagattgaccgtccttaagattgaggatggtatcattagcacgtaggccattgtttctgcgggtggccagggctgatattgttttcccccagtaaggctccaaggaaggggtggtgcagggagttgggacagaacaaacaaagcaatctttcaagaaccagcccccaacatagaagaggaaaggcccatgtttagcagaagggacacttggggctggagttgacatggactgggtgtgccattgccactgctgtcctctattcaactgtgtcacgttgtagaaggcactcctcagatctacagccccaaagggcgaacagggcagattgatgcttccaggccaacccagccttggtctccacactccttgagggttaccagacatgctcacctgcttacaaactgtttctgtaacctgatagttgtatattatttatcgtgtagagtataatgtgtaaagtgggagctaacagtcctcattaaagtgagaaaacagaagaggcagttttcaaggaaaatcagggttacttggcaagtttcagccaaaaaactgaccttgcttgtgaatttattggttattcaataaattctgtcgtaatggtgacaccaatatgtctgtctatgtctatgtttctgatgcaaagagtacttcaaggtttatctagaaaatgataaggcatgggcatctctaaacttcatgcactataaacaaacgcgttggcatttgagcattttattttaaaaatcagacataataacagttgccacatttcctgcctcagaggaagaagacataaaagttcttaaaagatcccattcaggcaccttggtctttcttggcccagagaaccaagaaattctaggaagcaagaggaagtttggatgctagttacctttcgggaccaccgtagcgcccagagggcgccctcacctcgagcggggaccgcaggtgggagaagcaggacaggggcgtggtctcaagggtgggcacgggggcgtgagctcgagggcggatctagggcgtggcgccggcctcgaggtccggatcgcagcaggctgagcgcgcctagatccgcattgcaagcggattcagcggagtttcgtgcgcctagcaggcacaggctccaggtaaccaaggccgggccagtggcggtgtagcccagcaaatctggccagcactaagccggatctacgccggcgggacgggctccgctggggagggagtggagttgatacgggatgagagggcgctcggttccggtaccccgggctaggatggagcaggagcaggagtcctcttcccaccctccttccggtccatcggtgggacgccgctacactgtggcatctggaagtcacttttcgacctctttttcccggacccgtgtaatgaatgggggcttagaaatcggggttggatgaaggcgtggaaggtaagaggagagtggttacagcggtgtcttgggcgccaaggacttaaacttcgtaaaaccacaggcgttgcgacccctgttagagcacgggctgaggagccggcgctggggcagagaatgcctgccggtttgtctggggtccaagcagttgccactcttcctcttgccttgttcttcggactgcgggtctgttacgaaaacagataatacttccctaggttctttgttttttgtggttattaggtcttctttccttccttccttccttccttccttccttccttccttccttctttccttccttccttccttctttcctttctttctttttttggtggcttcgaactcagagatctgcctgcctctgcctcccaaggttaaagacgtgctccaccacgcctggagcttaagaagctcatctcatattctcagctgctctcagtctcagttcttttaatgctggaaaaaaaaaaagtgtcatcgtcccaccccccaccccaccccaacccgccgcgtggccgttaagtctctttcccagttccagcgtggaggagtcacctgtagatccgagtttgactcggcaaaaactgtgtcagattgatgtgcattctttacctctgccttttcacccagaagagagttgttatggtgcgagtcacggagctagaggcaaattaggaggagatacagtgttcagacaagagcactggtgcgttgacttgagaaggcgggtgggtggggctgtgacctgaatttggtgagtagtgggagagcatatggtttctttctctggcctgctgccccatttagagctgttctgaaaggcggatttgtcttctagaagggaagagggagggtacatggttttttaaagacagtgtcaacaccaggggcccggcagcaggttgcaggagcattgggagcaggtttccgttctggaaggggggggggactacaggtatctgctttttccttcctccctccctctcttccgctctccctcccttccttctttttttcaggctttaatgatgtatttttggaaaactttgctttcttagaaacggccaattaggaaattaggaggtgggaaacagtactgttggaaactgtcttttctaaaggccagatgctgttttctgcttgtttgtttggacagggtcttactgtgtatagctcaggctggcctcaaagtctgaatgctgggacttccgacatgtgcagcacgcccagctcaaatgttactagctatgaagtgtgtggcatttcaactgaactgagtaatgtagtcgtttatggggacagctaagggtccccatcactatttttaatattagtatttcttaatggggaatgtgctcacagttctaggttaggatatcaataccccaactttgctgaaaagggtgttcccaggtgactgttgtagatcaggtgtggtatgttcttatggagactgtgttcatagctttgacactggaggtgtggtttgatgctgtcaagtttccttcagagacaataatgtatgtgtttatagcagacatttttggccagatagatttcattttatgatagggtctgtgcagcctgcaactcactatgactcagagaatgatcttgaatttctaatcattcagaaccaacttcccaggagcaggaattataggatagctccaccaaacaccctcatgttttgttggggaccaaacctgagctttgttcctagcaggcaagtactcttgacatccgagctttagcccttaacccttggccagatttcggtggcagcagatcttgtgtattttaaaggacctttacctgcattgctgtacccaccaggtgatagacgtcccttccatagtccagtgacaataatctcatatagcttcagatattgccaaggattttctgggggggggaacagagttcccccaattgagaaagaaagtagacctacatataaaatgctctaggtgtcaatgaactactagttaagtgtcaagagaagataccataaattaaaatgccttgaatttttagaccattttcattacaaagatggaagagttagtattccctgtgaatggcttgtgtgccctgccaaattttatcatcacagaaatttcaggtattaattaataccatcataaaacttggagttagaaacttaaagctagagaataaatactaggggctatagaaacgatggctgctctggtttcctacatgcaggagcacatacacattaaaaaaaaataaatcttcaaaaaaggaatattaaaccaattttgattttttcttttagtatagttggtttatttcaactcctttaagttaatgaagtgtgaattgaccatgtatatcgattagaaaaagttgaccatctgtactgttagcccaaaggaaaacaagaattttccatgcatgcctttaacgctagcactcaagaggctggaattgaaggattaatgcttcaaggctaccctagcttacataaagcccctccctcaacaaacaatagcaacagcaaaacctaagcaaaaattgcaatgctgagattcagtgtgaataaagctagggagatgacgctgtaggtagagacacctgctgccaagcctgactgcctgaattcaatcctggggttccatatggtaaaagagaatcagtcgttagataacagtgttctgctgtgcacttctgtagtctaagaagccaaaagttaatagaaaggagtgcctcaaaacacatgcagtaactgatacagaagaaaatgtgacccctttattagacctaagttcagggaggtgaaaacacagcccgggctatgcaaagtgcatctttaaccacgagttggttgtagttgacaccttcaggaatcaacatgattttaaaactcaggaccagatgtataatttgtgagacttttatttgtttaaattgtaagcattgtaggctggtgggagcagagtatgaagccagtatgccaggggcctcatgggatggatgcacaggctgtgtgcctgggaatctggctccattaaagctctatgtccatagctgaaaggatggtgaccccaccccagtgaaatgctaccacccccaaacactggagttttcttctgtttctttctttgtgctaggtgggatcaaacccagggtcttgcctccccccccacccccaccccaggccagcactcctctgctgtgctttgtgtcattgattcatacttttacttctaattaagaaattctcaagaaatcctcccatggttagtttttcttttgttcgagcagtagccatcattccttggagtcctgggtaccccggccacttgttcactcaggtgctcaccaaacagctgttgttggctctggggctacagttgtgaccatgatggaatgaatgtctccgtattttgtctggtgactagagaatgagacagacagttacacaagctatcctaatctcaagtggcacttcagaaaggcacagagggttgtgtgttgagcaagggcctgttgaatggttttggggaggcccagaaggtctccttcagtgtaagttgtatttgatatttaacatacccgaaaggtgactaggaagcaaccgggtaagttaggggatggatttctagaagaaaagtattgaacccaagaggaaaatgtggccttggggccatttgtaggattttggattatagtagtgggtactcatgggtttgaaatgagcaatgagtgcctctgtagttctcaaatgattatactgcagctgtgcagagaaccgtgtgagaagtgggttctgctggtacttacggtgccttatgggtcaccagtgtgagaagactgctttttaccctggcaagggcagcaccaaccagtcaagtggcacagcctgtgcaatcatgtgcagccacccaggaggggagagtgggtattaacaaacagtaacaccccatgcccctactgtcacccagggatggtgtggaggataaaatttgatagctgagatttagtttgtagttcaaatcagaaggctagtagtagttaactaacagtgttgacccggaggtagcaaggctgactcagaagtttctggcatgaacagctgagtgggatgggatagggaaagcatttatgatgttggggagcaccggggtggagtgggagtggggagcaggatgaggttggcaccagatgggggagagaaggtaattcccttttggagatgtgttgcttatgagagagacagccaaagggagccgaggagctggcaactagaagggtctgagatggaaatgcctgcaaaccttggtgtgtaaatactcgctgcatagtaaaccctcaaaagaaagggtagactggagagagaaagggtctatccttgcagctgttggccattccctgctcaagaagcgaggccagctaaggccactgttcataaggaattaggcacatacacagggtaggagaaaacctggggtctctgtggtttctgggtttgttttgttttgaattagaattgagctgagagacactgcatttgtttagttgttcctggaaatatcaggtagataagaggcaatgaagtatgggggaaatgagggtgggcccaaattccagagatgataaggacagggcagggctggtctgtgataggaggcagaggattcgtgaagacactttttatttgggactcaggacttcatttcactactcttgaaaggaaggaacatggcattaactgagtttgtttctgaagtagaatgtttctttaactagtgggttttttttttttaagtttttaagctttttttaaaaatgcatttaattttgctgtgctagggatcagacccacatgaaaggaagcacacttctagaagcacagtccagcctgttggagtattttctagtgccaaggttcatgactgaattccatgaaaactactgagttcatttttcctgggaagatgtgaacagaaagtctattcatcccagacagggcaatgctgatcgactgaaggattcttccggaagtctgtcttggtgagccagtgggaatgtgtgtgtgtgtgtgtgtgtggggtctaataaggaatgtgggtgagctggagagtggccttactccttcctggaccttgtgtagagcctggctccttggaaacattctagatggctaacaggcttttgttgagagggtaaacatcttagtttcctctgtgatcctggtgacttggggttttactctgtcttttgtagtcctatccaatgcttaggaagcattctatatgctccctaagttcctcggcaaccacttggttacttcagatgccatcaacatcttatatatagctattgtaaagaagaaacactactctcccttaagaagcccacacccaatctggatatattgtatccttcccccaggaacttctcttcctattaactcctatgcataaattcctattaaaagtcccctttagttaaaaaaaaaaaaaaaaaaaagtccccttgagtaaactccagctctgcctctcactgacttggcctcaaagtcttttctggtgtgaagtcaagaattctgacctccccccacacacacacacccaactagagagatctctttctagaacttcttcagcggctgtggtggccattggagctgagtctgtgccccacatggagctctgcttcctgcctttcaccttgtgattgggtgactgatgtcagtaaatgcctgacttgacttgggtcttgctcttaccaattttgccaaggttgccaaaggacgatgttgattgtcattcctcagaagcactgcacttaaattttgagacagggtttatttattgacctagggcttgatgataaggctaggttagataaggctaggttagatttggctaagctaactgtcctggagttctacctgtctctttcttttcagtgccggagattataagtatgtgccactgtgtttagcgtcttcctcctcttgttcttcttaattcggattctgggggtggaagtcaggtcttcatgctagctgagcaagaactttactgaccaaagtatcccaccagtttgatgcctcaggcgtgtaacctcagcagcggggatgggagtgaggaggaattagtggatccaaggagcttgttggaccgaatctgcatacttgaggttcagtgagatactgtgcctcagacgtaagctggggagtgactggaagatatctgttgttgatctctggtctccatctggtctccacctgtgcatgcaggtatgtttgtatacctgcccacacatgtgaacattcacatctaattcacacatctaatactcacaattataaagatggattctggtttctcctggaatatgaatatatttagtgtgtgtgtgtgtgtgtgtgtgtgtgtgtgtgtgtgtgtgtgtgtgtgtctcattgtattcataagtgcaattatttgtcagttagagagtatttacagatgggtgtatagctcaatggaattcctgcccagtatgtggaagaccctgggtttgattcctagtcctgcccaaaagtaaaataaaattttccacttagacatacgacaatgctataatgatttaaacgtctggtgatgtggtttcttattctgtcagccatgacctttgtctcatcatggtcccgtgctattgttgaggatcatccttagccattttggttgtttttgtgaacctgttggtgagggccccagctctctggacagctatgtggatattgaaagttaagtctcaggtccatgctgtatcattgtgtactctgatcaagccttctggaatcagccactggacataggaatgtgccccaggcactgtgctgggctttccgggtttgttagcttgttttgtccttgtgaggtgaagacagaactgttgatatgtatgcctaacctttcaagagttggagcgatagacctcaatttgttacgccgaataggacaattcagcagtgggggtgaaatcccgactcctttctctgattaatagagcctttggtaagactcaggaaaccttcctgtagctactgtgtggcctttcctgaaaactgcatgaggttcttagttcccacacaccacaggttcaagatgaaaacctacacttgtatgtcttaacagcctgtgcgtgcgcgcgcgcgcacgcgtgtgtgtgtgtgtgtgtgtgtgtgtgtgtgtgtgtgtgtgtgtgtatgcgcgcgcgcgcgcgcgcgcgtgctcgtgagcgtacacacccaccacatgtggtttggttcacttattcttaaaaactccaaggtttgatgtatgatcacttttccaactaaatcatttaaaattattgttttagtgaaagaagctaatattacacaatgtatattgtataacctcatatcccattgataatgtgaatgcaattttatgtttttaatgtacctgtgaaagaaatttgagtaaattaaaaaaaaagacactgtaatttggagacccaaagggcttttgtagtcttgaattgttaaatgatgctttccaaggtttctgctgctctaactggctctagaggtcattatcatcaaattcactgatttctcattagtgagcaaactcaagaaagtatccaaacagtagctggcagtgaggaatacggaaggaaaccttggtaatgtaccacaacacggttgaaacattgacaaaagaaggcatatattgtaagtagttaaaatgattccagagagttgtagatgaaatggtactctggaactattatggtccatttggagggcattcaaggtacacaatttgctggtgtgggaatgctgctcctgggaattccaaagaggtcctttaaaagaaaacaaagctaggaatatactaagatattcatagcaaatgctcataacaatgtaatttgaaaatacccataatattcatccccaagataccaattgtggtgaaaacaataaggatccttgatatccaggaaatgaaaagacagaagatactgccctctgtctgagcaaataaagtctgtaatgttcacagatatgtgtgaaaagcagtggagaagagtaaatccccggctgggatggctcagtgcacctgcctttcatgggcaagaccctcgtcggataccctgaaaccctgtaactggaggatataaaatgacaaccactgtgaatttgtttttgagaaattctaacactttgtaaatatttggagcattgttgccttttaaaaactaaaaaatttcttctttgagaatttcacatgtatacaacatattttgatcataattcactccccgctccccgcctccagaacctcctagatttcccttccatgtcccttcccagcttcattggcccctccctccttttcctctttttaacaatataacccacccgaatccaaaatgactgctacccaaatgctcatgggtatatagccactggaacatgtcaacctactagactgtcctctagccaccattaatggccagtagctcctcagcttgagagtggggattcatgctgaaattcaaattcaaacatcaaaattagaaacatcccatgtcctccaaaaggaaaaaaaaaaaaaaaaaagtttccactgaaaaaattttgggtgtgtgctttccgcccttttcttattgtatacatttgatatattttcttggaaatttgctttttaaatgatcatactggaatgcaacaccacttaatatgatttctcctcagaaacttcttttggtgccactacattgagatatccttggttttggaaatgattttaaatttaacaactgtgtctaaaagtaactcaaatcaagtgagcatggagggtgaggtttcccagttggattttgatgtatatggtcatatgcagagcccaggtcatgaagaggtccctgaagcctttggactgacaggcttcttaggagactggaagtctgcaggaagactgggggaggggtggtggtaagggcccagggtgtctggagctgttaatgactgctggcctggtggttcctggctataaataaagtctgagttctggtctcggtgtccccagagtgtcagcccttcctcatcactgactgctgctaaaccagagcggacaaccacatgcaaagtagttgaggtctcgtgttccttttactctgcctactccatgagaacagaaatagctacttgagggtggcaatgggaattaaagaagaatatatgtgaagcacttgttcattattaatagaaccattcctctaaatggtggcacaggcctttaatcccagcactatggaggtaaaggcaggtggatctcagagttcaaggccagcctggagtacagaagagttctggggctacatagagaaaccctgtctggtgggggatggggagaagaaggaaacaaatccatagtcctggacacacctgtatcagttctcagatgcatacccaattcagagctcctcaatgtgagaaggtgattttatttaaacttataccaccatccccatttccctgccacatgacccagtagtcccaagacccagacatcagccttcccagccttggccatcgtgaatctgccaaggccagctagcacccaggaattgggcacctctcaccagattcagctctttctaaccaaagttcagaaccattgggataatccccaaacaggacgagaacgctactgaaaacaaggcctgtggtttgggtttctctataaaagctctttctgtagaagccaacagtgggagctttgaattcacactctgctcgctgacccactgtgacttggacggtctgagtaccaaacttgagtttccttgtctggaggcagattcctgtaacatcaaagaggctgccctacattttgggaaggggtggatatgtgtgaatgtggggttttctttttcagtctttactaactgaataagctcgagctaggtccagagtacagtgtgagtaactagagatgggaaaggagtccaaggctagacagtggtctgcaggagctccccagagcacacagcataaattagtttacaccatggcactgaagtccccagctgactgagcagcactgtgtgttactggtttctacgtcatcactaagtgagataggtatttggaggagagggctgtgggttggtctcagggccttgcacattcaaggcctgctgccctcactaagcctccatggtctccatttttggatgaagaaactaatactcagaggggcgaaggaacttccactgtgtgttaagaagtagcatagttaatttatactcgtttctgtttgtcttcacctcttttggctcagtggcttctaatagtgaatgatagacttcaggatgcagcattcatgtgattcatcggagggaccggagggaccatgtggaagatgttgagctgggtttttgaacatgctgtggacaagcaggcaaagagcatttgtcagtgctaataggtagccttggacctcatcattcagaatgaaagtatgtcagttatcccatttaccaaaccaaaggcagagaacttgagggcagcctctgaaatgcaaaccatgtttaaaatctgggactaaggaagcactgggatgatgggagaatttatgatgaggtttgttcggagctctggacctgtcatgtggcaaacaggataggccgaattttgttctggctcagtttccacttcaggatgaaaaagctacagaaaatctctgctgaagggctgcgattggcaatcttcttgtcttatttgaaaatacctggagaggacaagtctaaaattttgtttccatcaaactgtgctatcatagtcactcctaaaataacatactgggccttcagaaaaaaaaaaaacaacaataaggacaaggctcacacaggctgtcacttggatgtgagcagggagattttttactcttgatggcctgtgatcatgaggatgaagattcctttaaaaaccgatttccatgtgtatgtgagtagatgtgattctgctgggcctgttgaaatccacctctgtgaaacagctctgccggtgtctgagacgtaatgtttctcctgttacacttcagcaccttgggggtaatattaaaccagcttagctgaggaaacatagcaaactttgagacgacgactctgaaatctttattgtgaacaaatctgaagtttactttttttttgtatgggtacttggaattgaacccaggaacttgctagacaagcactctataactgagctacaactctagcccatccccaaatctttatgcattagatttagaattgtcctttctccctttggataacctggcattctacttacctgtactctgctaacaatttatttccttcagtgtctatgtaaaagtcattttaaaagatgctttcgagtaacatgcttcagattgggtgtagtttggtgcattgcccttgcctagcatgaggaggacagacctgggtttgaattctagcactgcagagaggtaggaagacagacagacagatacatgcagctattctgcactgacttcggctacttaaatactggaatcctagagaatctgtcctttagtgtctttgcatttcagttaacagtacctttggggtcattgatgttacagtgtgtgtcggaatttcatttcttttacaacttaatactattccactctgttgccagaacaaacacgttttgtttctcatttctttttctagcttctaatgtctttttggtacttaaatgtagttgtgggcttcctttggctttcaagggaatgtgtgtctggatgtatgttgtatgtctgtggggataggtgcccatgtgccatgtggaggtcagaggacagcttttagagtcagctttctccttataccacctaggatctgggtattgaactcaagtcatcaggtttacagagcaagtccttttacctgctgagccatcatctcattggcccaggtgtgtgtgccatgtagtgtgtgccccttccccatccccgtttcttttctttctttttttgtttttttggtttttccgagacagggtttctctgtatagctttggagcctatcctggcactcgctctggagaccaggctggcctcaaactcacagagatccgcctgcctctgcctcccaagtgctgggattaaaggcgtgcgccaccaatgcccagcttcttttttctttttttccttgctgtgtggtctgtttttgtttttctgagacagaatcttatataggctaggctggccttgaactcttgttcctcttacctctacctcccaagtgccaaggtgacacagatgtataccactgtgcccagcttcatgtcttaattttgatagagccagtagataaccaactgataagtacaaatgatcctaaatgtttattttatgtgtatgaatgtttgccttcatatatatgtgtgtcacgtgggtgtttggtacccatagggaccagaagagggtgttgaattctctggaattgaagtgacaactagttgtgagctgttatgggggttcctagaaattgaacttgcatcttctgcaagaataagtaccctcaaccactgagccgcctctccaggccctaaaatcagttttgatacagactgaacaaaatccaacctttttgctctaacgcatgaaggcttctgtttaggtaaaatagctatcttttgatattaatgtttatgccattagaaatcacaatggagagatgactcagtggttaagagcacttgctgctctcccagaggatttaagtccaggttcccagtgctcacatcaaatggcttacagccacctgttactcccgctccagggcatgtggacactggtacatacacataaataaaaacaaacaactaaagtaagcttatcacctctaaacagaggtccccccacccccaccccgtgctgtttgtttgttttttaagaaataagctaacaagaagggaaaggttagtgcagccatgctttagggatgttttgtaaatcgcattgtcatccttgttgccacagccatcctattgagaaagtgtatgtcacagagcctctgggaagccgcactgtgtctaatgaagccaaagtgaaaggacacttgatgccctggtgttctgaagggctttgaagacctgcgcattcttgtatcttttgttctaccggaagccagtgcttgtgtgagaaaaggctgagcattaatacgtcgcgatttctccaacacaccatgatttctcttctgttttgtctttccaaatgagtattttttttgtctttttcatttttcttctttgtgagatggagtcttggtgtgtaactctgactgccttggaacttgctttgtagaccaggctgacccccagaactcagaaagattggctgccgctgcctctgcctccagagtactgggattaaaggtgtgtgccactacgtccagccaaattaatgttatttttatattttgtgtgtgttctatgtacatcgtattcatttactttgcatcctgccataagtgtcagtcactctatctcctacaagggtttcctcagttttgtttccttaaagaagtgtctggaacttcccttgctgtccttaagactggtttcttcctagacacctacatagctggcctcttgctctcttttgtaaccttggggtttctgtcgcctctcgtgttgagcatcctgatcacccagcctctgtcttttcctcaatagactgttgtctaatataaacatgaggaccagatggtatgaatttaaacctagctctttggctcatctagccctgtgactttaagccatgtgacttctttctgactcagtttccctatcttaaaaggtattactggtaaatcactgggagagttcctggaaaatattaagcatcccaaaagcaatgatgctgtttatattaccattacagttaggggtggatggtggtgcccccccccccccccgtttttttttttttttttttttttttgtggcatgcattttgcagtaatctgccaagaagaggtctgtgtgactttctgtgaagatgttcttgttttcatcacatttgacctgctgcctggctgacttgccgtttggaaatgaagctttgcctggcttcatcaaagccctcatcaggcactgtgccctaaatgtcccactccctgaatcctgtgcttaagggctcagctccgaaggctctaggtcagtcatcggtcattcttgctaactccggagatttaaatgctggcctttacaactatatactttaaaaaaatgacttatcatttgatcttaaagcagtatatatttagaaatgtctactttctgccagcactgggaactgaatgcagctcttccccaaatcaaaaggatgagcggataggtgttacacgcttagcagaggagcaggggctgtgatcggagggctcactcattccgcaaatgttgagcaagcttctgtgcccggcactagttgctaggtctgaagaaaggagctgtggctctgaaactcctctttcttcaccacataatctatctaattttggttgtaacattcaaaatactctttccacaggatcaccaaaaatgcaacccagtgctgctttataaaaggtccatgttacttaatattttcttggcaggagcctcagaaaactccagatgaattctgagagccatagatacaatgtcaagagctttccttgtggttggagcctttcactggaaggctcagaatcgaaacagacctcagtgagtgacagacaccagtgggtgggtaatagaaactaccctcaaaaagacgactgggaagggcagaggccagacatgcccagaggaagaggctgtgaagatgcagatagtaagaaagaggaaacccacccacgtagtccagtccttgccctcagctatctgtttctagcatatctcttagccttctcctggtggcactttgggctttctcattggagtcacaatcctgagacacttgtaagacttggtattagacacaggaattggtactttgccatgtcacggcagtcccagagagaggctgagcacgagattattccctggaatgacatgctaactgaacaatttataccattcctattgcggtgtggtatggatcctgctctgcatgtccatatggttgtatgagtgtgtgcatgtattttctgtacatgggcagttgtgaaggagtatttccaatgctttaaaaatggtattgcatgccaggcgtcggtggcgcacgcctttaataccagcactcgggaggcagaggcagaggatctctgtgagttcgagaccagcctggtctataagagctggttccaggccagcctccaaagccacagagaaaccctgtctcaaaaccaaaaaaaaaaaaaaaaaaaaaaaaatgatattgcagcattggtggtatgacttagggagagtgcttgcctagcttgctggaggccctggtttctattgtgaacactgtaaaatagaaaggaaaaagggtatagtagatagtttttttgtttggggttttggtttttcaagtcagtgtttctctgtgtagctgtggctgtcttggaactctgctctgtagaccagactggccttaaacttccagagatcatctgcctgctcagcctcctgaatgctgggattaaatgcgtgtactaccacctccaggttagatagagttttactatgttcatttataataagatgaacattgttatcatctctccaaattcttgctttggactgaggtagctcattgagtaaaagtacttagtaacaagcctgatgacctgagtttcatccttggaacctgcatggtagaaggagaggtcatcttctattaagttatcctctgacctccagtgaatatgatggcaggtgagtatatgcctgcacccctcccccatacaaatagaaacctttgaaaaacaatctttgcctttctgttggtgtgtaagacagagtctcactatgtagctctggctgtcctggaactcactatgttgaccaagctgactgtgaactcccagagatccgccagtctctgcctcctgtgtgctggaggtacaagccaccatgtcacacttcttctgttgtcttgcaatataggctaggctggcctggtacttgaactcatcctcctatctgcctcctaagttctgggattatagttgtgggccaccatacttttatttttaattattataaatgtaaccgttaggtctcaggccctttatatgtctagaaatgatctcaagctggactatagaacgatttttgatagttagataaaagccatcactcctcaggaacttgtgaagaggctggcttctccatacctccaaaggaatctggcttctccagcctccctcccctagctactccttataatctacagggactgtccacccctgctctctctgtccattctctatctctagccccccagaccctataccccttgctctatctttttgtgtctccactactctcttccaattctcaagccctggccacatccagtctgtttctggttctctctgctccggactcatgcagatgcctctggatattttcttacaataaaaaccttgctaatggagcaggtatgttggtgccaccttgcatgcagtcataaggaaggtatagcgtgggccacgcagctcatttcaaacacttgctcttcccacctatccctgtgttcagtggtctttccgaaagtgaatggacattagtaagtctgggggtgaatatgagtgatactttagaatctgttttattttgacatacacaagtgtgtcctggttctaccagtacattgtggtttttgaaatgccctcattttctgcatcagctgccttgttgtatttcttgcatattttaagctgaagctgatctgagagttagtggtttggagactttgcatgcatctcctataaaaaacagtcctgccctggtgtgcacccttagcccagcttgactttttctatctggtcctcgccatatggaactgtgcaaaatggtcattggttaaataaaagtagaaagaggcttttgtttcaccacagccaggtaaaccatgctcccttagtgttctgattagttatgggtgttgctgagtgaagtgccgcttctacactcaacccttggctgcttcttgttctggccttgctttactgaatttcagctaccaccctccctccctctgcccctccctccctcctctttaccttaccttttctggtgtcagggatagatcccaaagcctagagcacagttctgttgaattttggttgatagcatttacatgctaagaaccaggatttttcagagctaaaccacgggaagctaggtatgtgactgctttcaccatagcacttctttgtctttgaacgccatcattatgtcctcggtccccttcttttgcgtggttttcaaggtagctatcaaatcagcccaaagtctgctgttgtttaaactgtttcacagtgttttaactcccatccgtcatggtgcatgtgtggaggtcagaggacagaggacaacctgcagaagtcagttttctccttccaccaggtgggtgccagggattgataggcttggcagctgatgcctttatctgctgtaccgtctcactggccccatcatatatttatttttggagacacagtgtctctctgaaaatcttaatggtagttttcttcttcctaaactctgtttcctttcaacacttaagaagtactcacttgtaagaaagatatttaagtctcattttctcttaatctagattccctagtgaataaactgtcttgcactgatgaccagaaattccaggagctgatagggaaagcaagtgagctggagcccacctcactgttctacatgctggagccctgtgttttctgttggggatcacaggctttcctgggggcacttctgcagagaggaaaccttcctcttagccaggcttgagatggagatccaactgttttttgtaaacaacttccaaacctcctttgaaaggtgtgcctaagccaaatcctggaaccttttgaagatcttgtagtgtaaatagagctcattcttgctgtctctgttgtgggctgggactcttgggacttcccgggacttcccaggacttcccttcccttacttctccttctgctcttccagttgttcttcacgtctcctttttcttcattcaaggtcatctgtgtcttccttcccactccattgagtacccagatgccttttgccttgagctgggtgatgatttattttatgttggaatacagagagtgatcatcctgtctgtcctcaaggcatgtcatgcttctcttgtcccctttccttttaccaactttctttaattactggcacataaaaccaagtgtctgttttgagagtttagtctgccttgtgttttagtcacatgctcctaacctctattttcaggctctcttctcccttctcaaggggaattacttcgttccaatccgtaagttaagaatctttagtaagttgttagtatagcattcatgtgtacttccatcaagtttcccttcttcatggaaacccctttctctgtctgatgtctcgttttcctgtctccccactttatgaagatgctctactggttgaggctgcagtgattagtgaaaatttttaatcaactgctgtctccatttgacatgatagtaaatgtacaggatcaaaggcatgattagcttgttcaattgtccttcaagtcagatggctgagcaacgcagagaacatcgttcattctatatgcttatctgtgtgtatgtcaccaccgctgttttgtcttaacttgtgtgggtttgagttactgtctaacattatttattttaaccaaacgattcccatttattattccttgtagagcagctacattagcataaattcagcttttttactcaatgtttttagtgatcatttgatgacaatcctttgtgggttttcttgttttattttgtcttgtttttgaggcctagtcttactctggagcccagacctttgcctctgtcccaagagaactggtattaaaggcactggccaccatacctggcagtttttgagtttatattcattggagctcagtgaaccagagtgtacaaattcattttcatagatttctatggaagagttttaggattacagaaacattgcagagaaaaatagtttccatatttcgtactctttccccagtaatgggcatcttgtattattatttttttaatgtgtttgtgtgtgtctgtgtctgtgtctgtgtctgtgtgcatatttatccccatggaagccagaaagaaggagccatatcctttttaattggagtttcagatgggctgtagctgcctgccatggatgctgggaaccaaaccctggtcctctacaagagcagtaagtgctctaaaccactgagctgtctctcacccccaagtatggtgtgtttcttgtaactgactccccctacctctttcctcaacaatgagaattaaacccagcacctcctgcatgccaggcaagtgatctattgatgagctgcaccctggtgctcagatatcaatttctggtcattctgaggggtacataatgtcccttaaccacagtcacagtaatttccctgttctctaacaagcaggccctacttactcagcctccctcctgtcttccatacctctgacaaatattgatcttagtactgtttctacagttttgttttttctagaatatcctgtgcttgcgacaacatggatttcagtcttttctaactggctttttttgttgttgttgtgaccagataacttcttttggaggggccttggaggggggagttcgagacagggtttctcttggctttggaggctagctcttataaacctggcagatctcgaactcacagagatccacctgcctctgcctcccgagtgctgggagtcaaggcttgtgccaccactgcccggtgaccagataccttcttgtattatgttgtgtggatgtattagccacagagagaagctgagcctagcaggagggcactcctatgttaatgactttctgtatctctctgttcccagccagaactttatggtacaagaagctaagcatgcccagaaatgtccatcactgtaatcttcatgaccttaaactgagcctattgaggaaagaaccacccctatataagtttcataggcttcctgcatagaaccccacacactttggaaacgacttctgtgctcagcttgcctgctgcaagaactacatctacagttctccatgtcttaactgcatatttcagctttactaaagacactgagatgtgaactcattgccatcagttatggttatcccacagtatatttttcgatttacttattgaaggacattctgagtatgtccaaattttggcacttatggatggagttgctgtaaacattcgtttgtaaataccaggaacacaattgttgggttgaattgttactctatggtaagttgtgtaagaaactgcccagcggggttggggatttagctcagtggtaaagcacttgcctagcaagcacagggccttgggtttggtcctcagctctggaaagaagaaaaaaaaaaaaaaaaaaaaaaaaaaagaccccttgaagccttttgctgggtggtggtgacacacgcctttataattccagcactcgggaggcagaggcaagcaaatctctgtgagttcaagaccagtctggtctataagagctaattccaggacagcctccaaagccacagagaaaccctgtctcgaaaaaccaaaaaaaaaaaaaaaaaaaaaaaaaaaaacccagctgtctagccatactgttttgtattcatgggcctatttgaactgtttgaatatatgaatgaatttgtagaaagctaacttggaaagcttttcagccattattacacaattcttcctacaccctctttctctgttctcttcttctgggacttcccttgccaactgcttgcttttcatgttgcctctcaggtctcagagacgctgtccgtgttccataattgtttttttgttcctcagactgaatactgtcacttagcttttcttcagccccactggctctttcagcccaggcctgcctttgcacccctctaatcagttcaggtattgtaaatgtcagttctatttagtgcagcaattctcaacctgtgatcgcaactctctggtggtcaagcaacccattcatagtgtctgtctaagacctcagaaaacacaggtatctgcattatgattcataacagtagcaaaattcagttaggaagtagcagtgaaaatggttggggtcaccacatgagaaactgtattaaagggtcagcattaaggaagttgagaaccactgattgtaatatgtccattccagatttctgtaggtcccgttttaaaaaactgaattctttttactgccatttcaacttctcaatttgattagctacctcataattttgtttaattcttaagttgtttgaatagatgtttagtagttatttagtctgtttaggccagtcagtgcctggctttctttgggggatagaactgaccactttcaagtcccctctgtatggggcaggtttttgatttctttaatgccttgtaaatgttggttattttatctggacatcttgtgttgactctgggaatcagctcttcacccctgccctgctaagatttcttgttactactgttttttttttttttttttttttttttttttttttttttttttttttgaaggtgtattattgtaggaagccactcaagcctataatcccagcaccctagagactgaggctggaggattacaaatttgtaggccttggctacaaagtgaaatcttgcctcagaaggcgaaaaggaaagaaaaaaggggaagtcaccattcagttagccttggggtgattgctaaggattgaatagaagtacttttcctcatttcctaaactacaacggagaaaggatttcttcaagggatattgttggtattttaaaattagtactaattttatttttacttatgcgtatcgtgtatagttgtaaatacagtgcctgaagttacaggtggtttggaggcacctgacactggtgctgggaatagaactcaagccctctggaagagcggcaagtactcttatccactgagctattctcaagcccctggtattgatacgttagcggtagaactttaagtattgttgattggaataaaatgagatgaacaacttacgtaactaggaggctgttgttaatatgtcagtgagcacaggaaacttcataacaaggacaaagcgggaggggtctccatttagattagactgttaattgttccttagcactcatttcgagagtgctgttttagagagcttaacttgcattaggtctttggtttgattctcaaagaaggaggagaaggagaggggaaagttaaacttaaaatcacaaacattgtgttagaaaaagaagtaagatcagagacctcagtgagccacgggtttgctggagagggtggggagtaaacatgctggaatagctgctttctgggggtgtgcatgctacaaacacaccaccagcacccctttactcacttcccttttccttctacagactgtgtgaaaagcctgctgggacatgtcatcgttgctggatgcctggtgttcaacagaaacttggcagcacggtagctcctctgaacaagtgcaggatgtcaccagaaatcagggccccaatgagtacagccttcctgtgattctaaatggtaagaagtctgaatgtttgccttagtgtcatcctgtcgattatttctatattttttactttgtcttttagtattaacaaattacttcctaaatgagatttcttaaagtggcatcgtttattctggtgtcaaacatacttcaagtcggagtggtggtccatgcctgcaatcccagttaacttgggaaactgaagcaacgtgatcatcgatagttcaaggccaacctttgacctccaaacaacaaaaatattctcccctctactctcctgcccccctcctcaaaattatttcagatctgatatggataatatgacagtttttttttcaaatagtgctgttagttacagaaccaattgccatgtcactaaattgttcttttttgtttgtggggttttggtttggtttggtttggtttggtttggtttggttttgaagcagggtctcactgtgtatccttggctggcttggaactgacacacatctaactacctctgactcctgagtgctgggattaaaggctttcatatactcagtttacgggattgttcttaaaagacaaaacaaacaaacaaaaaacccagttgaggctggagagatggctcagcgggtaagaacatttgctgcttttacaaaggaccggtgtttgattcccaacacctacattgggagtgttacaaaactgcaactgtgactctacctcagggactctctggtttctggatacctgtactcatgtagacattttgccctcccatacacataatgaaaactaaatcttagagaacaacaacaacaacaaaaagccagggagttagctccatcaatgaagagctgaagaggcagataaggtcaggtccctgaggctcactggctaaccagtgatctataggccaatgagggaccctgttgcataaaaacctggcaaagagcaactgagaaacaataccccacccccgattgtatgtgcctgtgtacacacacatacaacatttgaatatttatgagcattttatatactaaaagttggctagactcttggcatttgaattcagacaatttatagaagcttggttttcttgttgttctgtttttttttttttttctagttttgagctaagtagcctgaaatttactgtgtgtccaggccctgatgaccttgaacttatgatccatctgcctctacctcctacatgttgggattacggatgtactatatgtctgatcttatgtggtgctaggcactgaatccagggtttcatgcatgcaaagcaagtggtctacaaactgaactacattcccagcccaagtcttgtttttctaagtcttgtttttctgtcatagccaatgcaggaggtgcagagctgtattgtttattgaacatatgatcactgtgaaactacacttggggtcctcccaacacagtcacccatctagcttcagttcagctaagcctttccagtccacttcgaatactcagaattgtcttgctcttgggatcttcagattgacagttgtttttaaacttgtctctaagtgtggcacaggtctaagcagccaaaagcagattggatctgacccgtgcacatctcctggcagctgacagctgctgatgtctgccaggaggaacttagtgatgatattaagatattaagaggtgcttgttctcttaactggcagaatactggcactcctggcatgtggacagtccagaaatcacagctacgatcatcatctgtggtcttgtgcttctatatatgtgcaggccagattatccggtttttgtttgtttgtttgtttgtttgtttgtttgagacagtctctcttaactctggctgccctggagctcattgtatagaccaggcttgcctctgcctcttgagtgctgggattaaaggcttgtggtactacattgagcctcagatgcttattgtagaatattttagtacatccttgaattaggtttggcatttgatttttaccccccagtatctggcttttaatatgagaacaatgggtcttttatgaagtgatctctattctctaattaagtcagtcttgttttgtttgaaatatatggcctcatagtaaaggagatagttttgagcctgaaaatattctgtaaacgattccaattttctatgcccttcattatgttttagcactgtcctgtccggtgatagcttgtcctactgataaactggtgactcatctggccacaacagagggaaactggaggaaataccattggcatccaaggcctggaaggttgccccatctcaaagggaagcctctgactgttgtttgaaatgctgagaaacttgtttcggaggagactgttttcttatcctgcaaaatactactttttgggtcttgtcctctccctaatcaccttctctgttctaagaattcatcagaagcctgaatttgttagcatcagacatttggaacttgctggagatgatgtgaacagcaacatcaattgcaccaaagttttacagagtgaccctgatgaaatccagaaggtcaagcttgagttactaacagtgaaattcaggaagcgcccacggtggacaccgtatgactatataaacatgacccgtgactgtgcctctttcatcaggttgcgcaaatatattgtagagcccctcagcaaagaagaggtagactttccaattgcgtattccatagtggttcaccacaagattgaaatgcttgacaggctgctgagggccatctatatgcctcagaatttctactgcatccacgtggacaaaaaagccgaggagccctttttagccgcggtgatgggcattgcatcctgctttggtaacgtcttcgtggccagccagctggagaatgttgtttatgcatcttggagtcgggtgcaggctgacctcaactgtatgaaggacctgtacaggatgagtgaaagctggaagtacttgatcaatctttgtggtatggatttccctatcaaaaccaacctagaaattgtcaggaagctcaagtcattcttgggtgaaaacaacctggaaactgagaagatgcctcagaacaaggaagagagatggaaaaaacgatatacagttgttgacgggaagctgacaaacactggggtagccaaagcacagcctccactcaaaactcctcttttttcaggcagtgcctacttcgtagtcagtagggaatatgtaggctatgtgctagaaaatgaagatatccgaaagttcatggagtgggcacaggacacatacagcccagatgagtatctctgggccactgtccaaaggatccctggagtccctggttctctcccctcaagccataaatatgacttgtctgacatgaatgctgtcgctaggtttgtcaagtggcagtactttgaaggcgacgtttcgggaggcgctccttacccaccatgcagcggggtccacgtgcgctcagtgtgtgttttcggagctggtgacttgagctggatgcttcgtaaacaccactttttcgctaataagtttgacatggatgttgacccctttgccatccagtgtttggatgagcatctgaggcataaagccctggaggccttagaacactaactgttgtcgggaatcctggggaaaacaaggctgtgtacagtgttactctcatctgcttccttccagagatggggttttcaagacagggtttctctgtgtagctctgtagaccaggctggccttgaactcacagaggtccgcctgcctctgcctcctgtgttctgggattaaaggcgtgcgccaccactgcctggctgggtaatggtcagtgtcagagaagctgcatgaattttgcagaattcagttagttacaagagaagttgatacattaagtgttctagagcagatgtcaggaaagttaagatggctggaggctggggaagattttatggacccaggtgaataggaaagaggccaatgaaggaatcagccttcccaactaatcaaagaaaccaggtacttaatccaaaggagatttgatttgtgccaaaattctcttgagaattttaaacatgatacttttcttgacatattaaatttgtagcaacaaccaatcacaaagatgtgatttaccttgtatagtttttggaatggatgtttggttttactcttaaattatccttgtaaatctactccctgctgttactctgtgggggtggtgtctctgtgtgtcagctcagggagtttaaaatatggtcagcatgaatatctccgtcttaatttttgcttataactatgcatacatgttttccaaagcagggaggggggaggacaatttctagctaaccaatttttatggattcttttaagttattagaaaattctaggaaccagctgggtgtgtgacctgtgtttgtgaagcaggatcgtctaagctcaagtgatagtgactgggctaggcaaagaagcaagaccccatctctttcaaagggagaagaaacaaactttttccagctatgcaatttttaccctgccttcccagactctgcatgttgtaaagcgacctatatgtcgctgttggaaggcccagtatcagtgctttcagtctttgatatggttcagtcaccagtaactactgcagaaagctagggaggatgaggaaggtggagtctatgagggtcattgctaaggcccccatacatgtttatagccaataattggctctatcactagaattaaaggtttctgcctaccggacctgctattgatttaggtggcagcatcctggccttgagttttcttgttatctgcccactggcttttcttagcctgttagttgctagtttttccctctctcatggcccttgctaaagagggaagaacaacacctgtgtgcacatgaagtgtttgaaggcctgggaagacagctgtggtatcacaaccagttttcaccgaaagacaaacggtacagggtttctgtaattctgactatcatctcagaggaagttttgttttgttttccccctcttgatattatttagctaaatctaaactgttgggccagaattccaatgattgtgaggccttgttatttagtattaaattttaaacaaggattgacaccatgtacttttattcctaaaatatagtcaactttaataatccatgagaaaaatcataatatcaacagagaaagtttgctttctgcctcaaagctagaatcgattttttcttgtaatgacaactcttatcattagaaaagccaggttttgtgttggaccaatagaaacatgcctgcctcggaactacagcactgacggtggtggtctgtgcccgctctactggcttccggtttctttctttagtttgtgtccaggtttccttgaatgcttcttttagtagaaagatttttacctatgagacagggcatcttctaaatctaaaacccgtgatacctagagatataaaatttgtgtgaacagctgtgatttgcagtttttctgtttctattttgaaaacgcaggggttaaagcaatggtccagtgacccagcaagtgaccctgacccgaagtcaccagcaattaacacatagagcccaatttgctttatactggatgaactcttgaactttgcaaaactggaaattaatttttttaattacaagtgttttttaaaaatcaagcgttgtatgttattcatctgaacactcttagtattgtagtgtggctgcatttaggttacagttaaatggcaagtttgagggtcgttcttttcccccactgtaggagtaaaacgaggactctagagttccagagcccacattaacgctgtgaagcctccacattgtctggtacctcaccttcctagcattgcacttgttgaactgtgtctgaggctttagcgtccgatgcccgatgcaggcagggctcctgcggtatctgttactgggactcaatgaatgctgcttttacattttccaatatgacttaaagcaaaagaaagtcatacggtagggacaaataatttaaagaaccaaaacaaacaaacaaacaaacttggaaatgaaaccatgagacattccagatgaacacaattccagttcattgggagatagatacaggctttatttaaattacttcatatttgttaatgaacactaattttaaaataaaatcattaaggtcttgtatggaaaactttttagtaatcacattcacaaataaaataggattctagctagtaagtcaatcaagatgtgtatatcatttgttaaaaaccaattttaaaagattgtttattttatagacaactgcctaggtcctcccaaggccaaggtaaaaaactgcttcactttaaaaatcaggaacgttatgatttcaaaacatgtatgtgtgtcatccatctagtagggttcatttaaatgcatttatttcctcttcacatgatttgggttggaagaggctgtcttagtagttcatgtgtagaattgatggaactggatgtttttagttgcttaaatcatcatcattaatgaagtgtaaaatgcaataccatttatggtaaggtttacttaatgaatcagtcatatcatcattaaaatcaatcattcagaaaccaattctgtgtctgcacaaattattccttcttagttctaccaatcacagtaaagttagtttttatatttgtgaatagtaattgaaaaatcaaggcagagatgtctgaaattaccaaggttaaaaaaaataaggaaaaaaaatgtctgaaaggaggatatggccagagaaaattacattgcaaaataaggtaaaaggttaggtgtggtggtgaactccagaggtaggtgtggttgtaaactcatgacaagcctggtttcagtagccagtaccaggccagtcagggataaacaatgaaacctgtcagaaaaaaaaaaaaaaaaagtaacaggtcatgcacaaagatgaaggtgggacgttcagaagcatgctgtgagtggcattcccagatgctgggcacatttcagcttgtgtccagtgatggagaggacagatttccacagattaactccatggctgtaaagctctgtggcactgtagcatgcctggcatgtatgagaaccttgattcttagcacaaaaaataatgataataaaatcttttacaagtttacagattattcatgtgttaagagagatctgaaatccatccattttgcaattttctagaatcagtttcatctacaatgtgtccacaagcactcagaagccatcaacaggtcagacatgatggcatctggactaagagctcagtatttggggacgagggtccttttcccctcagctatgcctcagacattgagaactcagcaaatggcagagtctaggcatttttagatgaaaccggtctgggaagcagcaaaacagatgaattataagcctttctcaaaacctgagtattttataaacgtgttgtcgtcattaattttttgtgctggggatcaaattaaggctctcacacacttgaggcaggctaaggtgtcacagagccactcctccagttctagttcaatcaattgaattgattgattaattgacttagatgtggtctcaatatatgacaaactggcctcaaattgatgatcatcctgccccaaccactcagttctgagatacagtcagatgccatcatttctaatttcagatttctttttattggtgtgtgtgtgtgtgcttgtgtagaaaccatgaaataatctcagttatcattctcaggaatgctacccaacctcctttgagaaaggttctcactgacctgaaatttacaaatagcttaggctggctgagccccgaaagtcctagagatcttgtctccctccccaatgctgggattgtaaaggttgcatcatttccagcattttcacatggtttattgggctcagactcaggtccacatgctttctgtagtttagtttaccaactaaactatatccccactcccaacattttcttacatcaaacatatgctaaccaaaaccaagatttaatttttaggtatcaaattagctagtgctgttgaatatttcaaaacattcattttcagtactaaaaatattataggaagaaaactacatataatgtgatcttctaaaagcaaaggtattgaacagaaagaagtctgaggagttttccgaaaactcctgcaacttttcaagtcattccctccagcgccataaaattgttggctgtccaatctgaatttggagccttttcctcatgatttgccttagggaatcttattccctctaccttgtctgtttactcaggcagaagaggtcttcctgccttcttctttctactcttcctcaggaaatgatttaaattcaagctgtgaggcttagcagtgttttttaaggccttagtcttgagtaactatgagatttcttagttgtataagtcaggcaaagcaattcccggaagtagcaatgcatttgctattggggaaaaaaaaaaaaaaaaaacctctggccactggtgtccctttatggaagaggcatgcatatatgcgccactaatattggccatgccaatctgccttcaaggtcccagagtgctgagttggtggtgattttgcctttggctccttaaaatgtatatctgtggggttggagaagtgactcagaggctaagagcaactaactactgtcctttagagaaccaaagagattctcagcacccatgtcagtgactcacaactgtgaacttaaagaaccagagcaccagagccacacttgttagacccccggaaaactcaggtctccagggtcccagcccaggaccacagtcaccccaatcaccagacagatttgaaaacttgctgcaaactgcatgaggctttattgcttaacgagctaaccccatgttagctcgggtctttcacccacctgccatggcggatggctagcaaagacagctcgaaggggctgcagagagatcttgtagggcagcgtaaggagagtgtctaggggtatgcacaggctcacgattggtgtgcctccaggcttggagggcttgccctgtgttgattggccaattggttgttatggcccataggccctcccagggtggttgctatgctcttcgtgtcattgctgtgcacttgtccgtaaagcacacccagagccgtaaagcatagcaccaccagctaacttctgattggttccttgccacgaggcaggcatctgacctcttagtgaccaaggcaaggtcatggtgagcatgtgttactgtcatggctgcagaaaggggcagctggtcccttcacactgaggctgaaagataaagctttatttaaaggaatgaacttccaggctgtgtccaagagaagtgaaaacagccccgccaaaagggaattcttataagtttttattggagtctataggatgattttagttgagctggagaccattaaggagaaaggaactgtatcaggcaaagggatttctgtaagcaaattttatgaggaggttctcaggctactaggatagtaggaggctgagatccagctgttctaattcgatgaagggtcagcagacttctgagaagtgcaaaatatccagagaggatgattcccacacaggtcatctgtcttgctatcttacgtgactcaatcttaagcttgccccacaacatactgtaactccagctccaggggaatctgacactctcttctgcttacccccaacatggcattgactcatacaaacaaataagtaaaaacaaatcttataatatatatatatatatatatatatatacacaagatttttgtttttgtatcaggtaagtatttgatgatgtgctacttgccagtgagaaaaagatgtttactgctcagaggttaagagcattggctgctcttccagaggtcctgagttcaattcccaacaatcacatggtggttcacaactatctataatgagatcaggtgccctctcccagcatgcaggcatacatgcagtcagaatctgtaaacataataaataaataaataaataaataaataaataaatcctttttttaaaaaaaagtatggttttttttttttactagaactggaaaacattcatcttcctgccacgggggtaactttgataaaccctgttggtgcacaagatcttgtctaactggagaattttgtgcagactgtgtgaaggatttcccacctttaagtttagctaagaaccaaaaatgtgatttcaagaaaccattgaaaaaattctgaacattaataccacatgtttaaatattgctaggtatttataatccatttttttgcctttatacatattatgaaatcccttggcctggttagaatttccttatatgacttgataaaagaaatattttctcattagagattttcttctgaaaggcccgctgcctctctgtctcccccccgcctatgctgatgctgggtgttctctctggagcagccgggatgggctggagagtgcagcgcggggcgataattgtccgggagctgctagctgccgcagagctgccctgcttcaccttcatcctgcccccgccggcctccacttcccccggctgccgttttccctcccaagccggttcacccaggcggggctgccctggcaccgcgccggggctggggccgagcacccctcgcccccacgccccccccccgttgagaaacactccgtcccaaggtctccgcccccaaggtcagccacctgggcgcggagggaggaatcaagtctgttgtaccagacaccagaccttgagaatatgctgatctggaatggctctgtgcctcatttgaaccatcaaatagaatccctgctcctagcttgcgcctttttccctatataaggacccctttcccttggctcggggcgcttggcctcagaaaagctaagtcgccccgggtacccgcgtctccaataaagcctcttgttttttacatccagttcgtggcctcgctggttcctgggtgtgtgggtctccctctacgaaagtatcccttcggggtctttcacttcctccccttccactcaaagaagagcactcattgtaatatgttcctttaagcccattgagtgaataacaaccgtcactgggcattagcttactgcatgttctacacacttggtaggtaatgttactttctttcttggcataactaccttaccattctgggtacagcttgcaaaggagctagacaggcataactctaagggcagctattgttttcaaacaaaaatgtcttctgtttcggctgttagacccccgaaaatctcaagtaaccggggtctcaggccaggttcgcggtcaccccaatcaccaggtggattcgagagcttgctgcaaactgcacgaggctttattgtaatttaacgaactaaccccatgttagctcgggtctttcacccacctgccatggcggacggctagaaaagacggcttctagggtttcccaaaagatcttgtagggcagcgtaaggggagtgtctaggggtacgcacaggcttacgcacaggctcacgattggtgtgcttccaggcttggagggcttgccctgtgttgattggtcaactggttgttatggcccataggccctcccagggtggttgctatgctctctacgtcatttctgtgcgcttgtctgtaaagcacacccagggtcgtaaagcatagcgccaccagctaacttctgattggctccttgtcacgagacaggcatctgacctctacgtgaccaaggcaggtttatggcaagcacgtgttcggctgttatggctgccaaaagggaagccggttccttcacggctacacctatccttccaacccacactctgctttgagtagaacacttcttaggaggaggcatgtgtgtatggctcttccacaaagcaacacaactaaccaaccctccctccctccttccttttatttatttttctttctttcaatagcaaatgcattgagaaattactggtatggaaacaaatagttcactctttttggagttgttgaaatgatcccttaaagagcttgtggagacatgagagagagaaatgaagaagcatggtgaatgcagaagcatgatcacacacacacacacacacacacacacacacactcacacacacacacacactccgtgttcccatgtgttcactagtggaggtcagaggtcaagtgccctttctatcacttttccccttgatttttttttttttttttttttttttgtaacaggatctctcaccgaacctgaagctagctgttttgttagactggccagctagccccaggcacgtgcctgtctccacccctcccccaaggactggggttggtggtttttaagtggacacaaatatgggtccttcctatgcatgtatataagcaaaactttgcctgccaagccatgcctagccctgggggaggaagtcttaaaagcaggaggggagaggagagtctggaagctatcaagagaatagtcctgatgtgtcttcttctaatacttgatgaaagtgtaagaagatggagaaggaggtgtccctacataaaatatatgagaagtttccaggcccaggttccagggcaacctgcctttatctgtactctctagtaatagcagctcgtccaggaaatggaacgaacagggaatttatgttaggctgggttttgtgtttctaagctaattagcaattgcaggatttgtcaaggaatgtgaggagtggaggaacctgctggaaagactggcatgtaggttagagaccagaaaaggtgggtgggcctacagaaaagcttgagggtaaaggaaagattagctccttgtctccaggctattgaggtaaaactgacaagcaaaaattatatgtgattaaagtgtagaacaggatgttttgatactcacactactaagggattaccacaatcaagttaatgagcatactcatcacacctcacagttgtttgtgtggtgaaaacactccaagatctactcttaggggcacagacatgactcagccaataaagatgttggctgccaagccttatgaactgagttcaatccccaggaccaacgtggtaggagaaagttgactttcccaagttgttccctgacctccacacacagtgacacaaaaataaataataaagtgtgtgtgtgtgtgtgtgtgtgtgtgtgtgtgtatgagagagagagagagagagagagagagagagagagagagagagagagagagagaggaagaggagagacctacttgttggagttttctcccagctaggtcctgccgcccttgagccccaaataaacatatggatgctatattaattatagaactgtcggttgatggctagggcttgttataggctagctctatcttaattattaactcatttctattaatctatttccacatggtcttggcttactggagaatgcctggacctgttactcctttggtggctacatggtggcgtcctttgtagtgcctctctgcctacctttcccagaattctcttcatctcctagtcctgcctatcttcttgcctctattggccaaacagtattttattcatcaaccagtaagagaaacatatatacagaaggacatcccccctcacctactcttagtaaatttgaagcacatagtatagtagtaaccagagttaccctgtacttaaggctaaaagtttatatctttggaactaaatcccttccattttttttctactctcacaacctctacaatcagctttctgttgttctatgaggctgacttcttcaggttgcacttaacaaagaggctagaaattgattgtcctgtgcctggcttctttcagtgcctcctggctttatccacactgttataacagcatactttcctgctcatttttcagagctgaatagtggtatcatactcacccattttattcattctcttacctgtcaatgaatacttataactcaggaagttccagcaaaacaaatatagccacccaccactttgacagtccagggagagagatgagtgatcagaaaggaagagaaggatgtattcagcatgacctgagtagacatttaagagggaccagtatcctaagtcctgtctttcatatactaataaagcttcagggttttgtagcagaaagacaaaagcagcggaatgagcatgtgcacggccaagtgatcttggttgaatggtgttctgattgatcatgctctcaggtctcattcagagatctatctggtaccagagaagccatgttttcttgagtaacagttctgatcctaagaagaaatttggaatttttataaaccattctgaagattccctgttgtttaaaagatacagtaatgcaatacttcccccagaagacgtgggtaattaaatgaaaatctcagtgccagacatgggataccttcccatgagatactggtcagggagttaacatatgcccccaaaagaacacagactactgccattgattgctcttggttgcccacaaaatcagaagataaggctttactgcttcagaatcatattattttggttgcaggacctaaaagtcaagctggaaccaacatgtcaacatcctctgctggctagcggtcatagttctaaaatgtgctttgtagaccactgtggtagaaaaggtatccatggacttagccagcagcagagcatgctacaatagtgaccttccaggcaagatgcatccactggtgagatagtggcatggttgttataagattaacagaccactctgacagaatttgagggctactccacaagagtgaagtcatgcttgattttgttcctggtcaaaagtacaatttggaaagtcaaagccctaggaaagaacctcctagacatgccaaatcccattcctaaatatttatctctacccatgtatgtgagtgctgctcttagccttggtctgagttgcttcttttttgcagtgggcagcagtagatgcccagattcagaactggtcagagtgctgagaatatgtgactgtacagtgctcatccctaaagaatgtccataccaatccccacaaagtttggggaacattgccgaagaaggggaaaggaagaatgtaaaagctgaaggctggggaggaatgctgagaaacacttgtttttagcgggacatgacatgggatctacactcaagaatcacagctgcggttacttgcacacaatcaagccagtcaacattccagcatgaatgggagagggttcatgaggctccatcctagctgagaagctattgacagttgatggctacttcgggggaaggagaatcagtcagtcacctttctttaggtatgtggaggccgcactaattggactcggtggattataccaaaaaaaaacaaaaaaacaaaaaaaaaaaacaaactaagaaggagaggacatgaaggtggagggggctgtcatgggtgggggaggtccaggaggagtgggaagagtgggtcagcatgggtacaatcaagatacatacacatgtgaaattgtcaaagaataaacaaaaacattctttgaaagaactaaaaattccaattcttcgtgtagtatacacgacacttctggactgcaggactggctggcctgaagctaagaagggattgaaatatgcctaaaatccttggactttctcattctgagggcagcaggagtttgactgcacccccaccttgcttagatggcagcagaccccagcagctagccttctcccaatgctgaccaactccagtgcacacagcaacggataagctcacaggtctccaaggcaacagagaccagttgctgcttatcagacctctgaaagatcccagggtggacttcctacacgacctgataaggttccttcccctggctcctcctactggttccttctggccctaggtatgcaaaagaagcccggtcaatgtttttgccccaactaatgacatactatcacaggaatcaaactggccattcttcctagggtataaatgtcccttgcaccctctgaataactgagctgtccactgacagtccctagggtctttttttttttttttttttgccaccattggcccaccagtgctctgccccattctcctccctggtcgggctattgctcagtcgtccagccacacctggactaagctgggcttgagcctggcacttgaccttgtctttgctccatctcttccatctctttttattgtatgacagattctgtccactctgactgactacatggggttctttgagaacatgatgctactccatgtctctatgaacagtgttcacttgaggctttgggtccccggtacctactcatcacctacctgatgaaacagtgctgggaagactctcagttgactgcctgcttgaccactcactagatcctcatttcacatgaactgagagcactaagatgctagagttactgtcctcttctctcagggaacaggaaggttcccaaacaccaaggaagcagagtgatgatatgggagacaatgtcacaaggctgtatcttgtgccctgagctcaaagattccatagtgtggaccgaatggtgaccattgctgtttgacaaagttgtggcatttcaacattgcagaccacacttctccagcactttttttactttcatttttaatgattctcaataccaatgcctttcactttgggaaattttgtgtggtcttaggtaaaaggataaaaatgtgtgcaatggtagcttcactaaacaaaagaattgttcagaagaaaaatccccatcaccatgggactaggaattccagtgtgccctcccaattacaccaagaacaggaatgttggagattcactagacacacctgatcccgaggataaaatgcctaggattcagatcccaagcctgaggccagtaagggcaagagttcagttaataaatacagagaaatcagaatggtactgtataatgggaaaagagtaagacaccaggaccttcccttttgggaatgttatgaggggaacaggaccatatataagactacgaaactgtaatatagtgtctgctccctggaagtccttttcccaaggtcaggcataggggtctctattccctggggggcttgaggaaatttcctgcttgataaagtagtccttcttatctctagcaagaggaacatgtgaccttccattaacatgtgactgttgcctgtcgtccaggtcaattcatcaacccctggtctcaagccacaccccagctcacatgccccttgtctcctgtttaatcctctgtgcaactatacagtataaaaagtgtgatcttttctcaattaaatgctgctggcagccaacctgcctcaccctgcctcacatgtttgtctcctcctcagccccgccccccactgactccacacatcctctttgggatctgaaccccctgcagaagcaggtctctggcaattccggtctatggtcatttggcaccattgctttgggccacagtccatcatggcaagaggacccagaagaggaaaccatttgtttttgagacagggtatcactatagagcccaggctcacctcaaagttgctaatctcctgtctcagtctcctaaatgctaggattacagataggtatgtcccatcaaggccagctttgattgggttgtttttgttttttggtttttttccttttacaaagcattttcagtaaaaaaagttaatacacatcacacattctcctaaaacactttgcttcagggtttcagaatagaagacactttctagtgataaatatttttcagtgataaattagccaagaatcatcgagtacctgtagcccacctatcacatggcagttgtgtggaaagattcctggggaaggcttttctctctcctatgtccctggcttagctgctctcgaagctaaaatgcatactactttaaatcaagtttgtgtatgtacaaacatcacagctcctctgttttcattatctacatcccccatgtcctctcttttgaatctcatacaaactggagtccagcattgtaggaagcaggtgtactgtgaccatgaccgtgaaaatgaccttcttggtggcatttctacattcagcttgggaaaagtacaacaggaactcacagaggtagacccgtcaactccttctccttccttccctctgagtgaacaaaaatgaacccaccctgccagagcccacactctgtgacctgtctcaaattaacacaatcacatgcttaggtaactggattgctaaggggcaaatctcctcaacagaaatatttgtggacagaaaataaaaatgacaggacatggtggtgcagcattgagtatccagtgcgattttctttcacctagattgtaaaaggctgaatttaggtaactattacaaggttattagaaattctgtatgcttttcccatctgttactatttctatttgaaagaaattaaagtgagattgttgttctccaataagagtaattaatcaagattaggcaaattaatttactttattaatgtgcaggtgtttactgagcacttactgcctatcttgctctatgccaggctctggaaacacaaaaatgaaggtgacacctcctgccccaatgaacaaaatcaaccatcaatttcacatttttactcagtgcaatattttattagatgtctttacagaatagcatctagcctccagatgttactttaatatattagtatgtattttctgctaaaatctagactggcaaaagtgtttgccaaattcatatctgataagagattgtcataaaaaaatgaacaacagatacttaaaattagatggtaagaaaaattaagaacctaaacttttaaaatgagcaaaagacccaaaagatgatacttcaagacataactggtaaataatcacaggaaaaaatgctccatgtgtcactagggaatgtcaaactaaaacaataaaatgccaaggcaaacctgtcagaatgtccagaatccaggacatgacaaatgctattgaagagatggcactgccagtgggaatacaaaatggcacagccaagcatagtctgacagtaccacccagcaatcatgatccttggcatctgccaaaatcagctaaatgtgagtgggaggtggttccatcagtacagtgcttgtcctgcaaacatgagggcctgagttcaatccatagaatcctgtcaaagctaggcttggtagacacaatgaaatcccattgctggagagtttcaaatatttgaacactcggtcctcactttgtagcaatgtttggaggtagtacagtcttgctggaggaagtatgtcactgaagtgggccttgagagttcacagcatcaccctacttccagttcaatctctctgctttgggtttgtgattgaagatgtgacctctcagcttcctgctccaacagcccagggaacaaaagggaaggaaatggtagtgattaaaatatgacaagcttttgaaatgtgcctgtgctggctagtcatatttcaacacacaaactaaagttatctgaaaggagagaacttcagttgaggaaatgccaccataagatctggcagtaaggcattttcttcattagtgatcaatggggaagggcccagcgcattgtgggtgatggcatccctgggctggtggtcctgggttctataagaaagcaggctgagtgagcagggagtcaagctagtatacagcactccttcacagcgtctgcatcagctcctgcctccaggttcctgccctgtttgagttcctgtccagacttccttcagtgatgaacagcaatatggaagtgtaagacaaataagccctttcttccccaacttgctttttggccatggtgttttattgcagccctaactaagatagtgtggaaacaagttggatcaagctctcaaatgcttcagaatgaaaggaagaggtgaaatgaaatctgagataagaactcagatgttcaggctctctccagtgtttcagcgtgtgagggtgaacagctatgttcaatatttgatcattctggtagttatgttctataaagtcaaagccaatcataaatcagcaaatattgaatacataattggaaacacaaagtagtgcctgcgatacttatgacagtataaggacatcagaattttctcaggtgacccaaccctagttttggtatactgttttgctctaactaaaaagccccctgcccccttctatgcttctgcagttactactactactactactactactactactactactactactactattaattgctcgtctttcaagacagggtttctctgtgtaatagtcctgactgtcctggaacttgctctgtaaaccagactggcctcgaactcagagatctgcctgcctctgcctcccaagtgctgggattaaagatgtgtaccaccgccacccagctctatacacaatagagattagcccaggagagaagcacccctatgcacagttctttccccaagccttcttcttttcccaatctagtcattcatttatgatggtagccatcttgctttctggtgactgcatcatcctgtagcaggaaatgaaggatgctgatcaaataagaactctgaaggacttggcctcggccatgccaagaatttctatggagggatctgagaagttgtctagagttccagcaaagatggttttccctgtctgggtagcctgtgccttggcccacttggatgacacactcccagggatgaactctgcagcactcttccaagacccacactgcagtaccagccctgctgtttgggtggcgaagcagttagtcactggaaggggaacatacagattatactgcttccacagctgataccatctgttgagaggccttaaaggaatcatgtggtttgtttgttcatttattttggtacttggaattaaacgtagggccttgaacatgctaggcaagaggtctaccactgagacatctctactacccttagagaagtcatttattcttccaagtacatataagcagagagatttagtaagaattctttatgcatatttcggaagacagagtgggagaacaataaaaatattcctttttatttttctgaaaatccagaaaagaccaaagggttaaaggtcattgtacaaaagatatttctccgggtattatgctttcagtctgttatgcttttagcccctgcagggccaatgtattaaatattgttcctcagctagtgaagctccttaggaaactatggaacttctatggggcctagttggtagagacaggacactactagagataggcctttgcaaggttgtaacctgggtcctactctctgtgtctgtcctaatgtgaagagcctcatggtctcaccatcacggagctccccctccccccgcccccaaaaaagccaaaaaagtaaggagtgaaaaacatcatactacagcaatggactgaaactctctgaaatcatgagccaaaatacatattttctcccgagttgtttctgtcagctgtcttggccacatcagtacattaggagaattgaagtgataaccttttctttgttctctgtactgagaaaggaatatcagataattccttgattaggacatctccctctacttcccagagtcaccaaaattgctgttgtgattattcagtgttgatcgttgtgtctcatttgtctcttgaagttaaggatcaggcacagtattctttttattcagtatcatcgtgtcttctgatgttgcagggcatagcaggtattctataacaacgtggttgaacataagttaaaataaaaaggtagagaggaaaacaatgaatattcgttaatttacatattcatatgggtatgtgctaactaaattgctattcagtttatttttcacaatttgattttttttctgaagatcaaaaacccagggctgtagagatgccatacaataacctgccactcatcatcagacattataaattatcaacttagcctccatctcccttctttctttctagtccattgttttgaggagataacagccctctttccagtctgccattgagcacaaaaggaaggcagtcttaactatttagagactcagggcagagatactccctttgcagttggcttttaggggtctgcttgtgatggttctagccattgagatggtcagatctgcttgtcataggatattctgggaaaggcctggaactcctaaagggccactgggaaagacagaatctctagggttgatgtttcctagatgctgtatttggaataactgcagttactgtgtgacccaaaaatatgagaagagagactaaagaaatggatttgctgagaacctgcctgattcagtgaattaaaatcccacaagttaccccacctttggccttgtcagtaccaaagtcaagtttttgcattgtttatggcatttagagtcagtgttactttcagataaaagaggtagtaaacactgacttatattcaggtctctctctgaagtctgtgtacttggccatcctctccactttttgaaaacaagtgctagaagtttctacgtcctatgacaaataaatattgttctaaagcaaataactgtgcttcatccagtggacttatctgctgcccaggtgtgcttgcattaagtacaaagtgatgcttcaacatctaatacatattttcttcctcattggtccactttcccaatagaaatcacagttctgtgaggaaagtacccttgtcttgtttttgtataattctgtactgatgtttcttttaagttaaaagaaagacaaattcaagtgaattaaaataataaatggtggaattctgccttctgtagtcaaaccataagaagggtggggctggcctcgtgcaaggatggagtcactgattagcaactgatatagtctgggctcagcagatcacagtgctttccctgcaactgtatggcctcacacctttctgtattactaggaaccgaactactggccacttcctgacaagtgagagaaaagcctttttggtttctgtagataacctctgtgaaaatggccccgatcagttgggcagaaattgtgtgacccaaggttgtgtgtgtgtccatgcttgtatttaaaaaacaaagtgcgttttgttttgttttgttttgttttgttttgttttgttgagacagggtttctctgtgtaaccctggctgtcctggaactagctctgtagacaaggctggcctcgaactcacagagactggcccaatctgttgcagaagacctggaggattcctggagaactgctggtcttcagcccatgtcagaaacccaaagaatctgtttctatcatcagtgaagggatagacagtggcagcaacaggatagacttggcattgagagtgaatgccattcgagcagaacatcataaaagctttccttcttacaagtcctattatttgggctgataccagaagattctcccacatttaggtgtgtctttccacccgagcaatcaaggcaaccgcccacacccaggcaaacacaggccagcatagtcctgcactgagaatctcctgcccagtgattctaaattatactaattgtgttgacaattgaagctaactatcacaccacacattttttttttctgatcttaaaactcaaatcacttttgtgggtctctgaaaactatcaccatgcctgaatattccgtttatagtgactgatggctggttgcctctgcttttactcaacattttctttcctttctccttacttaaaacactttctgactactttgcctagttttatcccattttcctttcactaaaataggccatgttagtacaaactggacttgtgtgatcatttcaatttaaaaaacaaatgataatcttagcacattcattaagctatccaattattgttgatcaaagtgatttttcataaaatttggaagctatagttttccataagcacatgaccatcaactcaagcactttagtttttcctgagtcctgatttcatgctgtgagcctggaaatgcagctttgtaggctctgtgttgagaaaacaccagtcagagggctctatacacttcaccccagcaccccaagtgtccctgctggagtgttgtggggttaccaaaaaaaggagcaatgtcaacaggactgcaattctcagccaggtgcctatttgctttatggctttcaaagaaaaccaaaagtaaaagaatagtctttaaaaatgtatggagtattaattgtaaacaatgagtttccttatgacatcttcatgcatgcagatcatgtactttgcccatatctgctcaccatctttgatcctgcctccctctgccattgttcctgttctctttccaaatcacccccatctattttcatatgtatgcatacatacatatgtatttaaataatgtttatgtgtaagagaaaacacatcaggtttgtcttttggatttggcttatttcacttaacatgatggtctccagttccatttattttcatgcaaatgacataacttcattcttttttttggttgagtaaggttcagttgcatacatataccatgttttctttattcattcatcagtcaatagatattggctggttccagaacttggctatggcgaggagaggcataatacatacagctctgaaaccattcctgctgtgtgctaacagactctcacaatacatacctaggaatggaatagcttcattatatgataggtctatttttagggggttttgcttgtttgtctttatggaatttcaatgctgattttcatagttgtatatttatttttaatctaactaatggtgaatacctcttctcccccaatcttcatcaggattctttgttattgttgttaatgacagccattttgcctgtcctgattttaatttgcatttttctgatagcaaagaacattgaacatttttaaaatgtatttatcagttatttggacatatagaagaatgttcttttttttttttttttcttttggtggtgatggtggctgtgttgttggattggcggtagggctcgggcagcttttgacgaaaagatttatggaaacagaatgatgtcagtgagtgggatgaccccatgccccaaggatcccagagaaagagggaaacctgccgccacagcctgccctgtcgggccactgagaggcatcggagcagcttccatatgctcacgctgtctcggcactcttgggcgttgggcttggcacttccgagatgataagacagatccagataaagaaaaacctgtaaaggtttacattgcgtttaaaaatatatgtaggcttgtgagagaaggaagcagaggcaggcagatttccacagagaaaccctgtcttagaaaaaaagaaacaaaaggaagtaaaagtagaatagtaaaaaagccacctagagatgaaaaatacacagagaatctggatactttataccatattgttgtctttaaattgtttgattgccgaggaaagacttactgctgctagaatacatttgattataaatgctgctaaattaatccaacctatacattttaaaaatgctttgacttcaaaatttaagtctaaggacaggctacttggaaaaagaatttctgtttatgtttccacagaaaataaaaagctatggattccttccagactaatatgatttgatcaagcaagactccctggagcagtgacccaactggtcctacatccaaagaagctgagatgatacagccttacaaactacaaaaacaaggacttggtcagatttctatgttttatcatgatcctaatggtatgaacattgcccctaatcagcaggaagcagtttagaaggaacgacacccaaattcccaaatattgtttataaatgtttgttttcatttaaatggggttagttataaatagtgatgagcatagtcaatctctttttaaagaaagaaaaggggggataggatataggaatgaatactttgcattggtatagattttcatttattgatacaactttaaggtcaattttgtgatatgtatatgtctcctcttgtttaggtattgtgttaatacagatcttttacctatagtaatcagaacttataattaggttagttaggttttctagatttacagagatgtatttgagatgaataggtattcttcaaacctttcaaagacctacagaaatatggcatttaaatggtttagggtttttcttggcagtgagacacaactgctcctggcacaccaattacgtcagaaaggaggatgggcatcgaagaaactcttatggagtttgctttcaacatggcaagattagccatttgggcaagaaactgctcttgcctgaactgtttgttgatgtataaactggacatgcaagacccacaagaaagtgactgctgaacttacaaaacaagacagtactgaagggttcctgttgaaatggagaagtgtgccagacacactggcctataggctgaagatggatgccccaacgttacagaggaactgtggatgactgtccaggtagcggatgtctctgtcaattctagagtttatatattatccttctgtggtctttgatagagttgaaggcagatagttatggttatagttttcttcagttattataaaagataagttatccttcttttattttagacagaaaacaggagatgatggggaatgtactgtgtatgtttatcttattgattgttaaataaagttctgtttggccaatgacagcaagttagacaggactaggagtcaaagaggattctgggaaatgtagtagagaagtggtgatccaggtaggaagtgacatagcaaggagactcatatttaaagagggagaaataggaagtgtccctcttttcccctctgctcctgctccagtggcacaatgtgattcactggcaaggagggacaccaataaggcatccgataagatgtcttataaaatatatagatgtacaataattaagactgagctaacagatgagaatcctagtcattggccaagcagcattgtacctaatatgtctctgtattattttgtccatccacatggcgggcagagcttgggcagctggcggagacctcccacgtggtggtagggctcaggcggcttttggcagaaagatttatcataacgtgtgtgtgtgtgtgtgtgtgtgtgtgtgtgtgtgtgtgtgtgttgagatagggtctctctgtgtagccttgtctgtcctagaactcaatatatagaccagactggccttaaacttacagagatctgctgcctccgccatttaagggctggaattaaaagcatgtgccaccattgccttgatagaagaatattcttatgatctgggaatctcaaatattaatctgtaggaaatgataaagtgacacacaggatgtgatgtggagagtttgatgtgagagtatggggtctcccaagaaccttgaaaatcatcagcatccccttcctaggtaaaaatactgtgaaggacagattggcagtcaattctaccaagccaaagggtctatcacttgctcctaatttggaggttttccatgttattacttcatgtgccttatacctcatccatctgaagtgacttattaaggtaagaatatgttcccagggcagggcagatgactgagcaggataaagggtgtggtagttgaagtgagaaatgatctccataggatcatggatttgaatacttggtctctaagtggaattgtttggaaaggttgtggaacctatggacctagagcctctggtggaagtacatcatgggtgatgggcttcaagacgtcatatcctgactccacctcctgctctctctgtttcctgtgtggatgaaagcaagcttagtcaacttcctgctcctactgccatgcttacctgctgctgccatttcttccccaccatgatggattacatcccatctggaattgtacagctacaataaacccattatccctcaatttccgtcagagtgttttaccgcagagatggaaaattaactgataaaattaactgatgccacaaaagcctggtgagccaagtccgactgccagactcactggtaaaaggagagattggcctcctcgagttatcctctgacctccatcttcatggttaggagccagcactcacacacaaatatcctgtatgcaataataacaatggtgacaataaaagttaaacagaacaggctgcgtttcagggccttgaatggggctctgctgtagagctctggtctagaaagtgtgaggtcctgcgttctgtggggtcccctttttccttcaagtccattggctaccaatccatgaggacaaatgggcaaaagtggtgacagagagctttgtatggcctgtgaacacagcagaaatagccttccaggagatagcttcagtgagacacacagctcaattttattccagagtgaggaaggacagggacagaggctgggacattacctaatttgtactaaacagcacgttcctgtcataaggctcctagtacaagtttaattaccatatgggcagcagagggaaaacttctgcaggggactgtgtcaaggttcacagtagagataagtcaggcattcaggcctagagacattctccagataaggttcaggtagagagccagaagcctgccactgggggaggggaggatggggtggggggcccatggtgctgagctcagagacagctgccaggtcatggcacactgcgacctctgaccagcaggacctcccaacagcagtccatccccaacagtacgtgtaaaaaacaaaataagataaaataaacaaacaaaaatgaaaccgccaagaaaggaagaaaagttgtttttcagttcttatttggtgtaattaatcagaagtgaatgaagtcacttcaattcttccttcttctgagctttaatggacacagatgaaacgcaaaggaagatagaacaactcccatgagaagcaatgtgtagtaggagggaaagtctcagacactgtttcagggggacatgccactaatgagtgaaaagtttctacaccccgactcgaacttcctctttgcctttacatgggaggaccctgataccccatcctccaggcagctcacattctccctcagggttttcgggacagcccccatttctttgtgtctttgaatggggctctagctttgattgctggttcccttcccttaaaatggggccctggtggaatttatgcagtgctttaatgaacacaggtgcgataaactctgagatatggttcacagcgaacacctgctactttgtcgacatgtgggcactggcgaagatgatggtggagattgcttacatcaggctctcttgaggcctgttatctaattgaagaaacaccacatgccgcaacactgagacagcacaacccgggctcagatggaagcatggagacacaaagtgacaattcagagtggaggttctggagatgagagaatgcggggaaaccaacaaacaaaagatataaagaagagcagatatgtgtttgaaacaaagagcattccatagccataagagagagcatgtcctgtcctcaggaaacaattagaaacaaaaaacaaaaaagtcccaaggcaaacaatcaactagccctggctatttcagcttcaaatcagaaactggtcaagctcagtcaaacatgtgacactttgtgatcagggatggtatgtaggacagaggttctgtaagatggtaatggatctgaaaaacacctgtgatctagtagtgacatcccaagagaatgcagtgccctgcatgtctttcctgtggtgatatgtgaagtcacgggcaagccacaggggagtgcagcatccatggtgattcacaacacacaatgcttaacaatggggctaagtcgttgtgtctctggttcatgtaattacttttcaccagcatcttggtctattcattccatttataaaaaggaaagcttcctgttgagcaatgtgcagagtgatggtcctacaccccaggtttccactgttaagctggactctctcagtttgtgtaaactcagcctgaaggtcacacaggaaatgtcctaacacctttctcagaatgtattgctgttgttcagatacggatacgaaaggcaagtttataactttatatttcttcccagctgagtaacactccttccctttgttctcaggctgcactacacataaaacaagaacttagggaaaaaagatatagccatggtgtctacctgccccagtttgcctgggaccaaaggcttgactatgctaaatccctacagtgccaagaaagaatgactgaccctggtatatatcctttctatgaattgataataaaaaatgattaagaggaaaaaaatctacaaacaaatttctatcaaaccaagaggagaataaaaacgaagtcagaaacataagaaggcttagcaaaagaaggagtctgtgttcatgtatgaaacaaatgaagaaattatagctccacctgggtgtgttttataaatcttaacaatactgaagagtggaaggagggagggaggggatgaggagggaagggaagtgccaggaggtcctgcctgtactgtttttttttttcattttcataaataagaaatttatctggaattaaaacaaatgatgaaatgtttcaactgacaaggtgagcagggaatgaatttcagccatcactgtgtttttaaaataggaattcaggacagagaaagaaggctgggtggggaaaggtgcttgctccacagcctgatggcctgagttcaatcccacatgggaggagagtctcccacaggttgtcctccaatttccacatgagtgacactaactggctcatcaactgtgctggctagtttttgtcaactcatcgcaaatgagaatcagcagttggagacctcagccagactactgttggccacggtagacaccgtctttggatttgaaccccagtaacccggttcaggagctgccaagtcggcagcatgatctatctggaactgtgcccacattgttatttcattccgttttccattaaagatggagacagaataaaaatgttccagacacctgggtcccatgcattcgaactgacatcagcaaactttcctggctgggtgcccacctgagggcaggggcagggccagcacactgtagcagtaaggagacagaaactattcccgaaaaacactgaagtccagccagaaccctccagaaaaagcagagtcccagctcaacctggcagccgctacagccttcaggggctctacagctagctagcgcctgatctggcttatgccttgtttcatgctccttctcttggccctccctgggccacttgaatagaatgtcctaatccagacagcctttgtcctcactgcctggagttcaaacctggatgccagcactctgacacagccatttcctgtcactgtaacaaacacactaggctaaattagaaaagaggcttaggagctcacagccctagaggtgcgaaagcctcatggccgatgacattgcaggtgtagagagcatcagtggaagagatctcaagactggaagccataggagacatgaagcgaatttacttcagaatacttcagtcttttgagaaagaacacacaccatgaattatctcttgtgagcctaggaagacaggatgccttctgccagcgtcctccataagatagctggtatccgataagataagtctttatggttgatacttaagactgagcttgcacagggctcgggtggctttggtggaaagacttatcgttagagaatggtgtcagtgagtgggatgaccccatgccctgaggttcccacaggaagaggggaacctgctgcctcatgctgccagtagcctcgagccaccagttcaggccagctatatttacagacatctcttgatttttttggggggggggttcaaattgttttcttgtgttagatttaagctcagtattatagtattatgggtaaggagctattattttgttattgttgaatatttatttattttttctttctttctttttttggttttacgagacagggtttctctgtgtagctttgcagcctatcctggcacttgctctggagaccaggctggcctcgaactcacagagatccacctgcctctggctcccgagtgctgggattcaaggcatgtgccaccaacgcccggtttattttttatttttttattttttgaggcatagtctcactatatagctcagaccagccttgcatttgtgacaatccttctgcctcagtctcccagatgctgggatgacaagcatgagttaccaagtcatgctttgaagtttttttttttttttttttttttttttaagcactaagcaatgtaccacaatccaattctgatactgcagttggcacagaccctacagataaagggcacatctccaaaaacgctgcttttaattcagatgccagctgcaagttcaagggatatcatgtcatctacactgtgactaactagctacaaattcagaattgctggggcaacctcaggctcaggaactcagtagaataatttacagaactcactcaagtgctacatttccaactatcattttcatgataaaggataccgtttaggaacagacaataatgtgatgtctaaagggccttgacagccacttctcagtccgttccctgtgggaaatctcctttggatgatgctactgtggaccagcctgggagctgctaatggtatatggtgtggacttaatttgtattttcttttcttttttttataaataatttattttatgtgtagtattcttttttaaaaaatatttcattttgtgtgcgtgattcttttgcccgcatgtatacacttgtagcacatgattacctcacatttaaggaggtcagaagtgggtacgaatcccttggaattgaagttacacacagttgtgagctgctgtgtaggtgctggaaatcaaactctgatcctctggaggatcagcaagttctcttacagactgagatacctgccatgtccttagctggcattttcttagtgcataataattttaccaccctctcatgtgcttattgcttccccttcacccttaccatgtgcacgagcgtgtgtgtgtgtgtgtgtgtgtgtgtgtgtgtgtgtgtgtgtgtgtgtgtgtgtgtgtttggtgtagtgtgctttggattgaacccaaggcctcaggtatgctaggcccctgctaatctaccacagggctgtatttccagcccagccctgtgttccttttttccagtgaaggccctttcaaaagttttgtgcacatttccatccttgtcccctttactgctgagttttgtatgctctctccacattttggctcaaatgtctatgcagctactgctgctccaaatgggagacaagacttgctggaaggaactgggtgttttcaaagctggccctaaggaagatgagtgacctttctgcctcaaagccctgttctacgggggatcatgcccattgcaaggggaacaagggcatgcagtgagacaataggcagcgagttggggtgggatcattgtcctctacactcatttcccctctttcttcctctctaggcatccagtggaccacagcgcgcgcgcgaacgcacacacacacacacacacacacacacacacacacacacacacacacagcttttctgaaagtgaattcctgtgtttttgttagtgatgacattacctcctacatgcatccccattttcctacttcctcttatttcgtgccctctttactgttgtttttaaatagtccattgtgattgtttgaatgagaatggctactacaggctcatatatttgaatacttggtcccgaattgatggagctatttgggaaggattatgaggtgtggccttaaggaggaggtgtgtcccagggcttgcgctttgaggttttaaaagcccatatcagtccttatggataaagatgcaagctctcagctactgctccagtaccatacccattcttctcaccatgatggtcatgggctctaatcttctgcaagcatgagccaaaagttaaacattttcttttataagccttggtcgtggtgtcttgtcacatcagtagaaaagtaactaagacatctatcgactctaatttaatctgtccatttacccataggtgtgggtccacccacaggagtgtgattaacctaccaggaaccacatccgtaaagaaaacatccctccctccttcaaaagccatcaactgtctaagctccacagtgaggggccgaggctcctggagcccttcccacgccatgctaagatattgattaatttggtttttatgtagcttttgtgcaggtaaccactgctgctcggagttcatgagagcagcaatcctgtcacatccagaagacacttgctttgctctagtccttcctgacctctggttcttaggatcttctcatgacctctgtgatagttagtccctgagccttgaggaagtcagtcagtgcctggcatgtgtgcttgcaatggcttcctctttcctgttgaccccaagaggcacactgctctctcccttctcgagtctgtgatactctgcttctgtcattcatacgttttctagataccaattttgtgtctcacccagccatcccactcaaacctaacttttgtcaaggctcttccggggaggggctgtctagctgggtataagctggggattgttcagaaaagagacaccgggcatctgctgtatcaagttacctgtggggacacctggtcacaggtctggcattagggagctcatctacccttacgtctatcatattgcaggcattcctcatggcctcctctggaatgtcaccaggaaagaactggagtttctaacttctccaagaaggaactcccaagacaaaattagagggggtgaggaattctcaggcgagttgaaagcagaacaagaaaaagattagtggtgactttgctagtccttcaaaaaggctgttttgagttttaccttcttttctggagaagtttttccctcctgtactgaacatttatttatttatttatttatttatttatttatttatttattggtttttcgaaacagggtttctctgtgtagctttggagcctatcctggcactccctctggagaccaggctggcctcgaactcacagagatccacctgcctctgcctcccgagtgctgggattaaaggcatatgccaccaatgcccggctatactgaacttttgaactccaattgaggaaagcattctggtctgcccaaggcaaaggattccagacagtcaggaaaacagtcctggattggtgtcatattaggaggaactgacgtaaaattggaaactaatggttctccatcatagggatagtatcctcgagaggaactagattaggattagaaaggggaaatcttttctctggtgcaggtaaatgctgacaggcagctcaccggcaagtggagaggcctcctgctgaccagtggccatcaccacagtgacaccatcaggaataaaaacattttacccctggtccctgcttattggttgtctgagccacaagccaaaggttgtgaaagcaattcggtacattctcagagtcaaaatgtttggagataagaatggaatttcatcaccagtactgttcctctcctgtaccaagctctccaatcgccaaggcattgcacagatttaatttttatcaacttataattcatgattctgacataggaatgtcttctcaataccaggaaaggaaaacactccacaaagcttggaacagaaatgtcactgtaaaaaaaagcttacacatcaccatgtagataaatttataaacgtgcttaattctgacaacccagaaagaggtgtgtgccattctacccgtgttcccttaaatacaaacatgttctgagtgatctgttttgccgcttcccgggatgagagtagacagggcttgcccggaagattcccaggaagaactcaggatcagatctctttctaatttggctggaggttcccagaacaaaagctctcttcttagttgttttcctttgctgaaaatttcaagagctcacacaagcatagccactgaccagtgcagattggactctccctgtcacctttgcactgtacctggctattacttgaatcaattgctgtgttcttagttttggctggagatggagttattcactgagtgggtataaaagagatgattgttccaggccatattaagagcatttaaagaggctggggcaaactcaaaacaaagcaactaactctaggatgtgttttgtagcttgaaataataattcctcctttttccttccagaattatttccatgccagataacttctggaaacttcacataaatatgtcttcaaacttaagatcttcccataatttggcagaagctgggaaacccctcattttgatgagcactgatattaactgtttgttggattttacagtaaatctaaggcatttctcattttacatattcccccccaaactgtgcaaaaacactataaaaggggctaaagagatggagcagtggttgagagcactggctgttttttcagaggacttatattccactgccagcatctttgttgtggctcacaaccacctgtgactcaggttctgagagatctgggggcatccactcacatggtacacagacagacatgagaacaaagaacctatccacactaaataaaagcatgcattgttgctcactgtcttgattgctgtgtgttcctgagacattcaagtagttttgcagcacttcagtctaaatgcagagcatctgcttcctagaaaatttaaacgcttaccacatgttttgtctgaggcagggtcttggaaactaaatgaacaaaagagggggattatagtaatatgaactgaaatctattccatgcttaccatgtccttgacaccatgtaacattttacacacactggccatttttatcactacctgtggggtagttatcacttatcctttaagtagtttagagaataagtatgttgacaaacaatgcctcaagaatatcccaatcctagatttctttgtttgaaataaatacattttaagatttgttttaaaaatatgtctgtgtgtatatctgggggatgtgtgtgtgagtgcaggggaatcccttggaattggagttacagccaggtgtaattctgtccaatgtaggtgcagggaactgagcatgggtcttctgcaagagcagtgcatgctctaactgctgggccaactctcaggcccagattttctaagagtagagatgtttgtttttccttctgtgtctttcaaatataaaatgatgcccctaataaatatttatagaatgagtaaatgaatgaatgaagtcctcagagtaaaagaggatgaatttgctgcatacgcttgtattttcttccttctatatgccacacacccacagagtccatgtagaaacagcttgctgttgacatgttggtttccatgctaatctggcttgtgtcatgtgtgtggctggccctcattcaatcttgcctttgattttataaatggagcacgggccaggtgttatcttcctagaaagctttggatttttgctgcatttaagctgtctgttgagggaaaatagtaaacagagcattgaaacatagagatgtacattgaagttggctgtgcgggtggctttaagagagtgaagactcctttccaaactgggaagctgcagaaggtgacatgatcctccctgcaagcatggttgtttccttttccttatgcaactgctatttatcagcaatatcagcagtcttcttagctttcctgagaagtgaaggtgagaaccaggattgggaaaacaacaacaacaacaataaccaggagcatatcacagtgggaacagagtcttttgattcagctgagaaaatgactctgttgtgaaacatattgctgtggacagaaataacaacagcagtgatgctggtggttgagagatgtcctgacctggagcaagcgagtcagggatagggaatggggacaagagacgcagaaagaacgaccacaagacaggattctgatcaagtgtcaaactttatttttctcaggctagcttatatagtcagtagagcaggatatggggaggggtagaatgggttgtttgtgctccaggtattagtgtaggcaggatattaggaagccaaaaagaggaagtttggcagtgtaaagagttcatgagtaagaggtccaggaagggttgcctaggtgactgagcctgtgggtggaggactgggtcaagttgtttcttttcttgagctgaggttctaaggagctgctatgtaaaggttagtatacaactatgtggccagccaaaaatggcctaggatctcaagccaagccctgagatctttggtttccaacacattcccccttccttgtataaaaagaagtggccaaaattttcagcagagggggatagaggcctggcccctagttggagaatctatgtggattttataaaggaccattttctctgcccttggggacagcttcttggagccatctgaaaggcacgaccgtctggatgccttttgtgggggtgggggagctttaggacatcgaccccattgcacacaggcatattcctcagaagatgacgtctccttgtagtaccatcaggtctgcacctctgaagctggctgtggggaagtgggttagtattggaccaggacaggcttaatggcagagtccatttgttgcttgaccacaagtcaattaaaggctcaagggccacaggaaaataataagaggagccctatcaggggtccaaggagggaaggggggagggtggttaaccatggggaagtagtaggaatgggtagaaggaagcaaaaaggagtaacaggagcttattttcccatacaaatgaagccagccaagtcgatcgttgagtcagtatcatctcggtcattttcaggggacatgtagaatgggttgattgggacctggaaggcaaggagaggcttgtcctcctgagggggcaagagtgtcagggtttttatctcccaagtcctcctccttggaggaggcttcagctgaaggatggggagattggttgccactgtgaaccgaaagtggaaacgccaagagcagtgatttggacagggattttttaaggcccaaaagcctcataataggagtccctcctgacagccacatctccttagcctcctgcactgcagagtcagcttagtatcactgtcaaccttaacctccctaattccatgacctcacttgcaacttcccagcattccccaggaatcgacaaggacaacattgaattctccccacccttggccactataaaagtggatgaactcaccatggatccacaagccaaggtacagaagcaaataagcagtttcaaatagcattaagaagatcgtgtgaagctttctttcttttacattttaaaccaacctgacatgggcttctcactagtgacccttccctaacctggccccgtcccacactgtactgctgcacttcatgtcttatgaacccatctggtctgccatgttgtcagacgatcaactcttggaggcagttgccaactctaactcatttcttttcattaatggttccttcctgggggaaccatggacaaagatccccgataaagaggaagaacttttttttaattgtttctttttaaccagagttccttgagtcttgaggaattctttgatcccagaaagaaataaatcttccttgctaatgcttgtcccattactcaccctttccacataggtggtgttcatgaccccaaagtcccaagtgctgggcaggctgctgggtcttcctctgactgaggctcacaatccaccttgtcctggacgcctcactgcatagactggcctgtctctctaatgagcactaaagttcccagattccctactctatcaagcccacattgagccacagttgtcccaacttgcaggacatcaacctgggttgcttaggtgactgaacctgtgggtggaggactggatcaagttgtttcttttcttgagctgaggttctaaggagctgctatgtaaaggttaactatgtggccggccaagcatggcctaggatctcatgccaagccctaagatctttggctcccaacagagagaggcaaggtcacttaagtggccgatgcaggcatggggtgggggtggaggaaggaccttgagatctttgtctcctgttcaagccatcagtaagcaacagccctcttcagaactctgaggagcagaatgtagagatttctggggattggctggcctttcctgttaagccaaatatgaaaataaagtagaaacgaacgcgtggcctagaaggtaaagtggcgaggcataattccattggagtaaggacttggaattctgatgggaaaaggtcatccctgctatgggaggaggcccaggttgtgtgcagatagtaaagcgatgtaaggctgcccattgcagtggaaagcctgccagtgctttgtcaagtcctctgctgggtgtcagagggcatccttagcatcttcaaatgaaactcataactgaccccctggctgtgctagttgagggtgggggcactcctgaaagtacagcatggagagtacccccaaatgctgtccttaatgtggcatttcctgatccacgtttgctgagctgttccaagtgctcgctctgctgaggaagcagtctttgtgtgatgtcaggaagcatatggtttctgaattgcagttaaagaaatcattccttaaatacttctcccgggttagtgaggtggctgggtaggaaaaggcacttgccaccaagccagctgacctttagacgttgatcctgtggtggaaggagagaaccttgcaaggtggttagttgtcttgtcgtctgacctccatgaatacatttgtgagcttgtgtgcgagcatgcactctcccttccaccccctcttccatacacatacacatttacaccaaataagtaaatgtaccccctcttccttcctcactttctcatacacatacccactcacactaaagaaataaatgcaaaaacaacagatactactaaattggatggagattctagctcaatgctagagtgcttgactagcatgtgtgaggccttaagttcaattcccatcactgaaaaaaaaaaaaagaagaatgaattaatgaatgaaaagagaaaattctaattcagtttcttgggatgctctgtggatctccttgagtgatttctttctctgataccctgcttttcgtttggatgacaagggatcatctttccattgcttgacacctattgggtgggttctaggtaagtggcagctagtaatggcaacaatggcactgtgagttttgtgaggctgagccctttgagaaggatccagccagaactcactgctttctgtggaacagaatgtactttcttctgacaagtctgaaagagaatgcccttcccagtgacaggctgttagcaccctcagagcaacgctactgaagaattttagcaggtttttaacggtgtgtgtgtgtgtgtgtgtgtgtgtgtgtgtgtgtgagagagagagagagagagagagagagagagagagagagagagagagagaggtatttccctttaaatacaacagtcatgtatgctgtaacaaggcttcttaaacttttctacttgtgaccacttttcacctggaaaatttttagcaatcaggtatataagaaatatatgtgtgtgaaatagctactgaaatcaaatatttaccaataataagtcagagagaaatttattttaaaacaattccttgacaaacatatacaattaccatttattaaagatgaaaagaaaactacatgctaatgagatgacctcacatgttcatttttgcataaatcttaaatcttggctgactgactatttgatactgtgacaagtaaagcatcttcagtgcttttcagagttgagtgatattttgattggtcaatcatcaatactgagagtcctacttcacatagatatataagaaaaatggtagaagcttgtttagggcatttcagaatttttttattaaaaagtctatccaaactctgagtcaaaactcatttaacattttctaaaattaacttgtcagcaactcaaatagaaaaatttaaaggcagataatcgagcacaattcaatctagaattatacaagtttgatatatgcttaggaaaggagggaactattaaaagtcttcattttctgtaattaaaccattgtttctttgagcatagaacttgtacgtacattgaaaacactacagttggtgacattcagtatcctggaagctgagccagatgtttcaggcagtgtctgttggtccttaaggcacgagggcaggcacagtgcaaagtgcacacgttgtttgtccagacctaaggctgcagtgacatcatggtagcaatgtggaccagccctgcccaaaataccccacatttatcatgcatttgattttgagtttttctccagtcattgtacattctgaaaacttttaatgttgccaaatctaattattatctcaattctccatcactaaacaaccatgctttcttccagaaaagcttctgtggcacaaaatcgaaagctgctcataaaaataaataaagcttaggcaaatgcagatttctgatcattttaaaaccacaaaatttccaggtggtggtggcacacacctttaatctcagaactctggaggcagaggcaggcagatctcagtgagtttgaggccagtctggtctacagagtgagttccaggacagccaggactattacacagagaagcccctgtctcagaaaaccaaaaccaaaaaaaaaaaaaaaaagggctgattaagattttcaaaaccccaatggaaaacagatggatcagatggattcacaaaactgctcaccgcatactaggctaagaaaaattaagttattatgtgcgactgagtgaacagagttgggatagactttttagtaatcagatgggttggtataattatgacttttcttttgaaattgtgtctgtccttagatgtcttatttctcatatggatgtaaggacatcttttctcctttctcatttgatgtctatgccttgcagcaatttaaacaaatctggaagatgctgcttttcttgcttcatcactccagagtctggatccctgttgaacatccttattggtctcatgggtacttgctgatcaacagtctgccctcctgactgcaggatgtaattcatcaagctcttgggcttgtaaatgtctaatctgatacttttcaatttcagatagttttgttttatttttttctatttgtttgtttgtttgttaatttaatgtgtgtgcctgggtgcatgtgtgtcttggtgttccaggagaagctagaggacaactttggggagttggttctttcttcctaacctggggatcccagggattgaactcaggtcgtcaggcttggtggcagatgcctttactcactcagatatcgtgatggccaaagttgtatttttttttcctcagaattttaaaaattaaatttttagaatataaagtaataggttccaacatggtattttcatgcattgccagacaggtttgttgttgtttttaaacagctacgtttggggctagtgagatggctcagtgggtaaagttgctgtcaacgaaaacctggcaaactgagtttcttctctagaacccaagtaaaggtgaaaggagagaaccacttcccaaaagttgtcttctgacatccataccttcatagtggcagtagagactatgtaaacaccacacacacacatacacacacacacacacacacaccctaaagcctgtagtaataccagagctccaaagtaatttaagatatacatagataggagatgtcttagtggttaagaacactttctgaggttgggatgtaattgatgagagaaaaataaatttaaaaaatgagccatggttgggctgaagagatggattagaggttaagagaagtggctgctcttccagaggtcctgagttcaatacccaacaacctcataatggctcacaaccatctgtaatgagatctgataccctcttctggcctgtgggaatataggcagacagaacaatgtatacataataaaaaaataaatcttaaaaaaatgagccatggcttaaagaaaaaagaaagaaagaaaaaaagaaagagagagagagagagagagagagagagagagagagagagaaagaaagaaagaaagaaagaaagaaagaggttttagttatttgttttcatttgggaatagtacagattatgcccacatcatttaaatggttgtataatagcctggatctccttatttctaactattaacctttaagcttacttttgctctgtataaaagaaaatgtttttatttacgtgaaaaaaaagctatacacataattgctgttttaagcttaatgaactaggataatttcattaaaaaacaatgattattttggaccaaacaggagtgactgtagacaagattgtatttaagtagaaaattatagtttatccattaccaaattctagtctcctttgttctcaaaacagaattcttctatgtgcacaagttagcagacaggcatacgccatcactcttggtttgcagctgtttcatttcaaacaactttccaagctgaagctggatgccttaaacttcaaaatagtcactgaggatgcttctcagcttacagtgaggtttgcctttgtgtaccagagtcctaggccagacgaagcatgactctgtgtgtgtgtgtgtgtgtgtgtgtgtgtgtgtgtgtgtgtgtgtgtgtgtgtgtgtgtgtgtgtgtcccaacacaccaagacttttcacccttcacccactcggaaagaagtaagaaagatgtgtcttcaacacagctattctgggaagggaaatagagaccaatgatctgtccttgaggtgttggtaaccttgtttacatcacataggggatgaaagcctggtgctagcaggaagctctcggtcagtggtctctgtgggactatggtctgttatttgtctttatctctatcagctgtgttgttgagtgctgcctggaggttagtttcgatatctgtcacatagggcttcttgaccagggctatttctgagatcggaggtgagtggaggagagaatgacttagaggccgagtaagattggaagggaaaacagcattataacaacagtgacttgttcctcttttcggtttagggcactgactagaaacatttaagctttgtttgggtggtttagaaccagacattatagaagatggtagttggtaatctgttgattatgacctcagtcatgaaggaagaggactattatttcaggtgaacactctggaatagtacacaccagtgtgcagagattggcagaaatttggcttttgtttgcttcttatttctttccctttcctgtagcccaggctggtctcaggctcattcacaaaggctgactttgaacttccatcctccagcttgtacctcaggaatacccagaattccaggcaggacatcacactgtttatgcaatgctggggaagaaacccaaggcgtcctgaatattaggcaagcactcctgagatttaaggtaaaagcagcaggcccaagtgaagtcagtgcttttaggagagttggcctctaaacttctgttatagcctgacagacccagtataaattgaaaacgtcctaagcatgaaaatgtttaacatgctggcatcatgcttggcctcctctaccttaaatgtgctcagtatgtgaacagtaaaaatataattgtgcaaagccacagaggatacaagcccattgtttaatgaagcattgactgtctatggaacgtataaatgcagtactgggcactgtggggcacagtacaggcactttcctcttaggattacctgcctgaatgccattgctcagtatcacctgaagactattgcaacacctgtattgctagctccaagaaagatcagaactccaggtctattgttaagtgaggagccgtgtgaggtgtagtggctcatgtctgtggtttgagcaattctctttttagctctatggattctcttacatgaataaaatattttcatttctactcattcaatgcaaatttttggttaacttgtaagagctaagaaatatgcctttccttcattcatcaaatgtgctggaatatttcttttaacgcctttaatcccagcacttgggaggcagaggcaggaagatctctgtgagttcgaggccagcctggtctaccgagcgagttccaggacaacctccaaagcaatacggagaaaccctgcctcgaaaaacaaaaacaaaacaaaacaaaattctttaaaaaaaatacatttggggctgcagagatgtctcagcaaataagggaactcttgtagaggactcaagttttgttcccagcaatcacattggagagttcacacaaccgcctgtaaccctagccccacaagatctgatgacgttttctgacctctgcgggcacctgcacacatgcgtggatcacacatatgcgtaagtatgagcatatatgtaatgtaaaagtaaaacgatcttaaaacaatatttttatgtattttgaagccttttatacacgtataatgtgttttaatcatctcaaccccctcactctcctttccagctcttctcagatacagccacactaccgacttcgtatcctttaaaaaagcttaatgtgtccaattagtgctgttcatttgctcatagctgtaaggccttctactggagcatgggcaacctaccaggaactagaaattgccaaatctctttggctggggtggggtcttggaagcccctctcccatccatgctggagcattaactggcttgatcttgtgcaggtcttgtgtaggcaaccacggcccctgtgagttcatgtccagaagacactacacagcaatcctcctgacctctggctgctatggtcttcccacttcctcttccacaatgttctctggaccttgtagagaggaccattgctatagctgtcccgttgaaggctggacactcccaatcacttcttctctgcacattgatcagttgtgaatctctatgaaccatcatgcactgcaaaaagaagattctgatgagggctgaaagcagcatgaattatgggtataaagataagtatttagaaggcagtgtaatactgtttatacagaagaataaaatcagtaatttctcccctgggttctataacccccccaatcatggttcttgatcacatcctatagtttgtgttctcccaccaacagccctttctccacatcctcactagcatctgttttctttctcttagacattctgactggggtaggatgaaattgcaacgtacttttaatttgcatttctctgatggccaaggacggcaaatacttcaacatttgtttttcttagctatttgtgtgtcttctcttgagaactctccattcagttccatagcccacttttcagtcgtgctacttgttttcttggtgttcagttttctgagttctttgtatagtctagacactatcctctatcatatgtatagctggtaagtattgttttcccattctatagaaggaaggttaagaggggagagtttacaagggtaaggtgtaggaggggatagcagaaggataaataacagtaaggatatttgaagaagacatagagaaacctattattttataagattcctaaaaacatattttaaaatttattttatttattttttcttcacgtttgtgtgcatgtatgtatgtgtgcgcacatgtgtatggtacctgtagaagccagaagaggatatccaattccctatattgagtcatctgatgtaggttctggaagctgaattcaagtccttcacaaatgcagcatgtacttttaaccaccgaggcatctccccagcttcctgctccccagtgtattttaaagaacccacagtttaaatgtagtaaccctacacaaggggataacgctcctcccatgagccaatgttttaaagtttttgttacatgagactttgatttccttggttgggttaattacgaggtttttctttgcgagtgggaaggtgtattgtgaatgtgagttttttctccctggtttctttcttagcatatttttgctgttgttgtttgtttgtttgttgtttgggggtgtttttttgtgaataaggaagctacttaattgggtatgttaattttgtaacctgctactttgctgagaatgcttgtctgcccaaagagttttctggtggagtctttgggactttacatgtgtaatgtagcttgcaaataaagatactttgaattcttcttcccttactatttatatgatattatttcatctgttgttttcttactctacctgggacttcaagtacagcactgagtaggagtgttgagagtggataccttgtcttgttcctgatcttagtgcaagtattttagtttccctccatttaatgacagctgtgtgtttgtcatacatactctttattgtgctgagctatgtttcctctattcccagtctctctggggttttatcatggagtgatgttggattttgaaaaggtcttttccttgatggccacgtcttaaggaatccctcctgtttctttctaccaacattttcatgcttcattgtctgccatagctttatttttttattaaattttaaaatttatctttcataccaacctcttctccacctgttcccttccccaccttccttttacccctgtcccccaatccactcttccagttccattcaaaaaggttaaggtctcccatgggagtcaacaaagcatggcatatcaagttgatgcagaaccaagctcctctaccctgcatcaaagctgggcaaggcatcctatcaaagggaacaggttccaaaaagccagctcatgtgccagggacagggcctggtcccactactgggggccccacatacaggacaagctacacaattgtcacccacattcagaggaactaggtcagtcccaggcaggttccctggccatcagtctagagtccatgagctgcgttcttatgtttacagcagactgggtaattttatgaacaatcaaaatttgtttggtccctgattctggattattccattgcagaagacaagaggatgagaggagaggtgtctaactcatccttttaccaggaacccactcccacagtaactaatccagttctgaaataatagctttgatcttaatgggtcagaatcgtcttgacctaattgttgtttgagactctcacctcccaagatgaacttggggagatacatttcaaccaatagcagcaggacccacatctatctgtctgatttagataatttctggttaggttctatgttagcagcattggtcatgttgagggctggattcaacacctacaaaagggtcttatacatattaggtgactaataaatacctgatgagcaaataaatgccacaaggccatttcctcccccacactgtttactgtttgtatcagggtttagcaaagttctcctctaaatggctaaagagtaattcaagcattgtggctgtacagctctgacaatgcagtgtgaaggcaggagtcagtgtggccatgttccattaaatctctattaaaaacagcccatagtccagatttagactttgggttatattttgcagaccctggttgtgattgttaatcactgttgccaacttgactggttttgcagtcacctagatgacgccactctgtgtgtgtctttgatttccagaaaagcttaactgaggaaggaggcttactacacatgtgtgtgctccatcatatgaagtcccagactcaataaagagaagaaaaggaggaagccaaatgagcaccagaattcaactttctcaacctcgtaactgaaagcccaaagggaccagcatccttttgttctcgctcgaatgctttccctaatgaactgtcacccctcattctgactcaaagtaaaccctcttaaattgcttttgttaggtacttttgttacagcagcaagaatactgtggtgtagaccaacctgactgtatacttgcttgtttctacagcacaagtgttctattccccatctgcctcagcatggtcctcagcatggcattccatgccatctcttactctggatggggaagctgagtgtcccctcaaaagcccatataaatgagcatcatatggttcagcctttcactgggtaatatcaaatgacagttttctctccaagagtcttcaaaactcttaccttaaaggtggcctttgatcataccctgcaatccctaaatattgcaacatggttttcttaatggtcagtgtggtaatctcagaacagtaatttcagtgttagaagctggtatttcccgagtcagccacaatgaaaggcagtctcaaagcagttactatatttctgttgcttctgctatcattgtttttggatcaccctgtcctcactaggaggaatgttcattcattcattcattcattcattcacttattcaacaaatatcaacagcacaatactcatatgccctcataccacttattctcaacaagtgtatataaaaacaaagcacaacaaaacagacatgctaaatgtgatacatgtcttaatagtttgacgccagcctgggctacacagtgaaatatttttatgccagtccatgctaatgaatgagattatgtcaaaacaaaacaacaagagaacttaccctctcccaaatccttcagccaggaaaatttgctctatgaaaatacaatagaaaaaaatctttttttttttaactttgaactattttgctaccaaggagtatgctagagagaaaatgagggcccctgggtttgcattgactgttttctacctctttttgtccaggctgctaagttcactgattctcaaatgagcagttcatagtgcatatagccaggagtttgctggaggagtgccaggccggctgaaatagcaaccttttgaccatgacttctggggggaaaggagctctctctgcagtcatcgctcatgaaacttctggaatgtgtttgcacaaagggttcattgattgtcaaagtactgctacagccattcctttatttctatggaagaagcatcagcaaatgcagccatcagattcttccaagtctgcacagggaggggttcaaaggctgtgtttgccttcactaatcatcggttcaggcttcccttgggggcggaggtcctggagaaaaagccgaatccctgagtcagggtaaagactgccagctgagacaacttactgagccacacaggacctccccaacctgatatggaacagacaagaggagaaaaaaagcctcctatggacagtaacctgccaagaacagggcaataccagccactgttcttgaaagtggcaactagttgttcttttagcagttttatgaaaaacaccctcccagcctgccttccaaagtcttccttgtagctgtgagtccacagaaacacaaactttgtcctcttgtgtgactcttttaaagggtaagcatgtcccagaggtagactacatcaaagtgagccaagctaaaacagatgtgagtttgtaaatgctttctttccctctgtgtgtgtgtcaggcggggggtgggggcagcgggggtgggtggtggaatcaagtgtctaaggatgggtaattagaaagggttgtttaaaaaaagatgggtcgcctacagaatgacagaactgtaatcaccctgcagacttgaaggagttacagttttaggagtgaaagaacatgtatacctcttttatgtaaaacagaacaaatcaatactgccacatataggaggtagaggccggaggatcaggacaagaccacccttagataacattgtaagatagaggtcaaaccgtggcacatgaaaccttatttcatacaaacaaagccgaaacaaacatacaacaacaacaaataacacaaactctttggaggcacagggtcactcaccatcatgtccttaccatggccttccacaatctacaaggctccccactttacagcccactctctgaagggccaagtttgaatatctccatgggtttggcctctgtattgtataatagaaaagagtaacctggaaaagagatcaaaatctagctactgtcccagcccagggttcagggattttttaataagaacaaaatgataaaaatgaggactgttcacggagacctttcagtatgccgggctcctggtaggagtacgtgtactctctcattttatttctaagatgagaatgttaagcagcactggtttccttcccattttacaggtgagggcaagggctttgataagaaactcagaccagagcaggcattcattaactctgtggtctgtttctttccactagaccgttttaaaagaaaacttagatctgtttagaccttctcgatacgggtcacctagaatctccgtggattccaagcttggatttctacaaagccatttcagtgcatattgcctctggatagacatttttggaggggaatgcagagtttggattcaaatagttctttcctgggtgtaacaagtgagtatagtgtcagacatatgctgaagtccttttttcctcctgtgttgccaacccagtctatttgcttatttatttatttatttatttatttatttatttatttatttattcactcactcattcattcatttattatttatttaattttctttttaaccctagcataaggcaactaacaaaactcccactttaacttggaatttaaagagggaattactcatcgaagcaaagtaacatcgagttttattcaaaacaaaacaggccataacaacataaatccaggaaatgtagtgctccatggaaactttgaagcaatctctaacagaaggaggaaagaaagcaagtgggtgagaatgttctccttggggttcagaaggcagaagcaatgcttctccgactgtcaggaaaagatgaccattttgtccccaacaaagtcatcattgccttgcttttaacagctgatgaattggaaaattatagcatgtcagagtttgaaagttctgtccaaagatgagataatcttctctcaagcagtgaaggctggcttggcaggctgttgtctcatccttgtctgtgtggaacagctttttgttcaggagatactaattcctacctttcatgtcacagggtttgtttgtttgtttgtttgtttgttttgttttgtttttctggacctgaggatggaacctagggcccagtgcttataggcatgtgtctacaactgagctaaatcctcaacctggtctttgtcaaccatattttttgagtggctaattttgtacctggagtacttccgtgtatatggttccactcatttatggtcccaaacgtcctctaaacaaaggcttcgcagttttggtttccttgagaagcctcaccaaccctgtgtgttcatgtactacactgggtttgtcttggtcgagtctttattttgtatacagtttgttgttgttcgtttgtctattgttttcttgcttaagatagaggcttactttgctttggtgacttgacagctgtcttagagtcatgaccctttccctctctgagttgaaattatacatttggcaagtggaaaattttcatagatgctgagctatccttctgggttctctagattattccactactcttgctctgcaatactatagtcatcttactgcagtcgctttatgttctttttcatacattatttattggctgtctttgtacatctactcattcacagtcattttaagaatcttattagagtttgtagaagaatgacaacgccaagcccaacgggtctcctgcctagaccctggggcctgtgaatattactgacaagaccaaaaggatggtgaaggtgtggctagagtaaactgattgaggtggagaggttattggaaatgactctgtggatttgatctgatgacaaagcacacaggaggagtcaaagacagaagggaggcagcataacgccagaagcagagattaagtaaaacacttgaagacagagggagggggacaggcccagaaatctgtactggaaactggaacaaagcaaaaaggaaaagaaaaaaaaaaatctcctctcctaaagagcaaggctggttgactccttcacattagctggggatatcagttagttttctgttactaaaacagaatgcctgctacagtcaatagtcaatttaaaaggaagaaaggttcgagttccgctggatcctccagtcactcccgcttgatctggaaagctgcactcctctccctctcttcctctctctctccctccaaaccctgccctctcagagaatttccaacaaagaaaatgggcctaaaagcccagttctgcattcttgctggctgtggcagctcctcccctgaagtccctgcctaaagtgctcaacttttgacggtactcgggcacaaatccagtttgtggtggacatgtcatcaccccttgcctacagggtattcaagctccctactttagttcttgcggtgacttctcctgctttgatctctggggctggagaactcacccatgagtttctttgctcaaataaacccgttcttttactttttcgattcagcttgatctggcttattgtgttggcagagaaacctattatcatgatacagaaaacctattaatttgttttggtttacagttttggaagttctagttcatgttctgtggattttgtggttttgggttaatggccaggcagtgtatcaccttgctggcagggcagagaaagttgtttacttcatggcagccatgaagcaaactaagaaagactaagatttaatatgtattttattacccccttttatgtgtatgggtctttgcctgcatgattattgatgtgccatgttggcacagtgccagtaagggacaaaaggggttaaatgggtgctaggattttaacccaggtcctttggaagagcagtctgctctcaactgcttagccatctctccagctccaagatttaatattttatcagtagtgtttgaccagatatttaatgtatgttatatctggtataataataaatatgcaatgattacagcgaatatgccccatgttgcactggggcctttagcatcctctcagaatcccagatgaagaagaaacttgttcctgcccacatggctacagatgtggcctagtgcaggctaggaagcacatctagtgacagatgccagatgtggaacccggtcactccactttgaagcctgtgtttggccacttggccaccctcttgtagcacaagactagagagtacactgggactgcaggcctgagcacccactccaagagtacaggaagccaggcttatcttcttattcttccagaaagccctttgaggaaacttcctacttcaaatttcttcttaggataggttttttgtttctgttgttattgcttttatatgttattgttgttttatgtatgtttttatatgttttaaattaaaatataattacataaagctttccctttccaccctccaggccttcccatgtctccttcctccaatctccctcctgtctccctccctactctcaaagtgacagcctcggcgtttttttgttttaaaggaagaagggtgcaaatttcaacacctaagaagtaatatttactgttttaaagggggaggaaaactttctccatagtaatggatgggaaacatgacacatttcttttctggccccacctgtgtctatttactgtagggcttgtctgtggtgacagtgtgggaagagctttttgtcctgtttacactgggtgtggttttccctcctcaacctgtgtgtaactcactgtgaacactgcttgggagggacttgtgtgtggactggtactactgaatgtcttcctgctggcactgcagaagcactgtgtcctggcatatagtaactgaaaaggatacacacacgcatatactcctctctgtgtctctgtctctgggtatgtgtttctattttctctctgtttgtttgtttaaggcagggtcccactatatatcactggtggtctggaactcggaatataggcttccctcaacctcatagaaacccacctgtctctacctcatagagacctacctgtctctcccttatagagacacacctgtctctgcctcctgcatgctgggattaatggtgtgaaccaccatgcctagctttttctgtcattcttaaaactgacaactagaggtagagggtataactcaacagtacagttccggtttagcatgggcgaggttgtgggttccatcgccagcacctaaaacaaacaatccggaatgctgtggctagatgagtggatgtttcctaaaaacaaggactctctttcactaaagctcaacacacttgctaaaatctgtaagttaaacccagggagatagctcactggttagaagcacttgaatttgattcccggattccacattccacaatagaaatagagaattgactccagaaaattttccttggcatgtatgtctttgctcacatgcttacattctctctctctctctctctctctctctctctctctctctctctctctctctctctctcacacacacacacacacacaaacagattgaaaacaataacaaatagtaacagtaaaacttgttttttaaaaatatctgtaaattaacatggctactgtaggcaggatttttcactgggaccatcatctcccaaataaccacacaaagacattattatttataaatgctcagtcaatagcttaggcttgttactaagtagctcttacaacttaaattaacccatatctatttaacccaatttaaattaacccacatggctcatggcttgttacctcattttctaaagtcctgcttccactgcatctggctggtgactctgcccttttttatccctatgcttcttcttcttttttttttctgtctgaaagtcctgcctaacctcttcctgcctagctactgaccattagctctttattagaccaatgagagcaacacatcgtcacagtgtacaaaaagactattccataagagctacaccataactgacagattctcagaccctgtccctgtgtcaccctccagtaacaactatagcaaatgagctccttgagaatttcctgttgtattacaccgtcaattgctttaactttctagagtgtgcaataactagttcctggccagccctggactgtccagatcccaaaagtgtgcccccaacaaacccatcattagaatattagtacaaaaatgtatgaaggaaatgaggcatgaggaaacactgtatggttgtatcctgtgtgaagtgtatagagtctgcaggcacaagagctgtagcaacaaggtttgatcatacatgtgcagagtatgcagagctattcagttctattaatagaattcttttccctggaggaagtattagtatattgcattaatattattctcacatggccaaaatactatgataaggccatagagaactacatagcaaaagaaaagttcaagtttctcagtatattaaccacacatcctgatggcaagactgagttcattccatccattgcaggatacgagtgttcagtacacactgtccaatggcatcccaagaaagcactctacgagtggaagccattgagaagcatttcccatgcaccaaatgctctgaagactgtattttacttagcagagtttgtttttttttttttctgaaccccgaaagacagttattactatgagtccaaacttgaggatatagaatgccaatttatcagttctgtccagtttatactaaaaatacttcttcatttcagcagcattacacatttgaccatatgtcttcaatacattaacaaagcaacttcgagtaattcagtgactgagttgctaatccactgctcacagcaaagtgagaaagctacacagattcctttcctgtattcctcattctgtttctttatttagtacatgatgatttttaacagactcgataacttgacagaaagataagtaatcatagtggttttcatggaaaagtcttcttgtatctaaagattagaaaaatacaagtttattgaatattaaaaaaattagttcctaaaaatttccttgacctttctgagtttgatgctgtattagagacctttgagaaatgcaactacacacacagtaaatttgtaatctatttacatattgcacacatagtcatgtatatatgcatttattagattggcctgcaagataacagagattccaaagtcccacagtagaagtgcaagttaggggatggaaagccaggaaagcccagtggtggctcagtgtcagattagatactatagtttactattcgaagtctaagtcctgagagccctggaagcttttgtaagccccagaaggagaagggagggattaccctcttctgtcatcttccatctgaacgcacagccaatttaattctctcacccacatccaggcagatctgcctgactcaaacataatcttccctggaaacacccttatagataaaactagaaggatgccttattagctttctaggctccccacaatccccacagttaaagtgatgcctaaaatcaaccaccataagcactttcacagattacagacctgtggctgggagaagtcagtctgttctattcctcccttatgaggagttctcagttaaatgtccccagcatgctgatcacttgattaaaagctgtctgccacacaccctgctgtaccaggaaatgactctgtttatagttactccaattgcagcttttttttttttgctataaaaatacttgtgtaggggtgcctatataaatatcccattcttcattaaagtctctatttatctatacgtttatcttgccaatggctggtagttttctgtctatacaggcaactataagacattgcgttactcatctgtttggtgttgaaactagttttttctgtgtctttttgttgtgcttcccatcattgccttgcttttgagtacaaagttcatactcagcttccttgtctcagccctggcattcttctccaaaacatgctggctcttttgtggtgaaccatatcatctgagttagagtttctatggctgtgaaacaccatgactgaaaaacaaattggagagaaaagggtttattttgacttaaacgtccactttgctgttcatcactgaaggaagtctggacaggaactcaaacagggcaggatcttggaggcaggagctgatgcagaggccagggaggggtgcttcccctggcttgcttagcctgttttcttatagaacccaggaccaccatcccagggatggcacaacccaccatcgactgggccctcccccattgattactggatttcatgaaggcatttccttgactgaggctccttcctctctggtgactccagcttgtgtcaagttgacacaaaaccagccgggacacatatcttgtagaagataaaaatgaggcatgctcacttctattagagtttctctacaatagacaaagctggcgagatatagccatactcaagttttatgcagctgtgtacacagatatgtattcgtgtgtgtgtgtgtgcgtgtgtgtgtgtgtgtgtgtgtgtgtgtgtgtgtgtgtgtgtgtgtgtgtgtgtttctacatgttttggttttttacgatggttaatcttcatagcccacttgattaaatatagatgagtcgggtaggagattgagccacacctccaggagtgttggtgaagacctttctagagagctacccgaaaagggaggaagacccactctgaatgtgagtggtactatcctcgtgggctggggaacccaggtgaacaaaaaggggaaatgaggagaatgttgagtgagtgcagcaatccttcctgcttcctgattggctgtgatgtaactgctctgctccacggcactctcccaatcctgtggactgtctcctgtgaatcggtgagctgaattgaagcaggcagttagtggattttaggccagacagaccttgtctccatctccataagcaacaagcaacaagcagacgggattccagaaaagataacagaaaacaatgcagagtcactcaaaagtggaagtgagcataaacgttggggaaggcagagttactctaagaagttgtctggttaggaaaagagggaggggcattacagggaagtggtcggtgtgattgacatcggctctatgagggggggtgatggaaagggctgactcatgacctgctttcacttggctgctggtggactttagagttctttgcttagtcgaactggagccagctgagctgggcatggctgtgtggactaacgtcagctggattggagggtaatctgctttcggagacagttattgtagacagagggctgtagatgtttccagccaaacatcagacacccaataaaaatctgtggagcaaaacgtaaaaagaacaaaacatttcatattcctcatataggcaatttactggttaaagatagcaccttgaatattcatatgtttttcagttcatttcttcactaagatgagagttaatgatttctttttctgaaaacccttaaatacaaagagactatgagtggaggaaattcaaaggaaagctcagagtattagcaagggatgcgtgactgtgaactgacatagagactcaatgaactgaaacccaagctggcagtgagggggaatgagccacctgtcagtttgcacccagaagcaagaacgggatgcacaggactcagcgtgaccagctatctctacagcaagtggaagcctatgttagaagcttccttctcaaggtctttggtggatctctctgccccaccctttgtgcagagtgggagttcaacctcagagctgtgctgcccagtgtggtcagtgcttgctacccatgccctttgaggaggtgctgtgttgtgtggatgttctgaactgggatatgctgtaacatgaaagagacactggatctcaaagagtcagttagaaacagaatatacaatatcctggccagcaagatgaatgagcgggtataagcccatgctacctagcctgatgacctgagtttgattcttagaacctatatggtagggaagagagcaaactcctaaaagttctcttctgacctccatatgtgcatttatactctctgtggtggtttgaatgtaattggccccataccctcacagggaatggcactattaggaggtgtggttttgctggagtgggtatggacttgttagaggaagtgtcactgtaggggtgggctttgaggtttcctatgctcaggataccacccagtgtttcagttgacttcctgttgcttgcaagatgtaggactctcagctagtactccagttctatgtctacctgcacacaaccatgctatccctgccatgatgataatggactgaacctctgaaactgttaagtgagccaccccaattaaatgttttacttaataagttgctgtggtcatggtatctgtttacacaataaaaaccctaagattctctctctctctctctctctctctctctctctctctctctctctgtgtgtgtgtttctcatacacacacagataaatgtaataaaagattaagtaagatataaaatatcacgataatttaaaaatattggttactatggtcaggcatgggagtcagtatagagcatttgagcataggcttctacccagcatgactgaggtcaaccctcagtactgtagccaataatccaataaaatactgattctatgttgaagcattattaactttggtcagctgagctggataaaacatggttacaattaacgtctagttattttttttagtttaaatttatagatgggagtctcatgtggcccaggctgacatttgttgtggaatattactttaactgggcaaagatgtgttacatttgtttatgctgtggaatattacattaactgggcaaagatgtgttacatttctttatgctgcatttatttaatgatgtaagatgtgtgtttaatcatgaaaagatatgtttcatttgtttcatcttgcttgtctaaggcacctgattgggctaataaaaagtagaccagccaatagctaggccggagaaaggataggtggggctggtgggcagagaaaataaataggaggagaaatctaggctcaagagaatgggaatgagagagaagaagagatcagaacaagggaaatgcgggggcggggggcgggggcgggggagcagaagccaggcagcctcgagtcagtcagacacaagaagcagtgaaaagtaaacaaaaagtagataaagagaaacagattcatttaagttaaaagagctagccagaaacaagtctaagctaggccaagcattcataactagcaagaagtctccatgtcatgatttgggagctggttggtggacctaaagaaaaagcctgataacagactttgaactaatcagtagcatctgataaccttggatccgatcctccttgctactacttttcaagtgctgggattacaggtgagtactgtacacaatttttttatggtgtgagggatgaagttcaaggctctgtgcaagtggtcttaaaggttgagtcatctctctaagccccagctataaaattcttaaaagccttgttggatctacacactgagacggaagggccctccacaggtctcttctggatagctgcctctcttcctgactgctgagacaatggactgggttcatatctcagtcacgaatatttgcaaactgttgtccagtgtcccccgtggtcctactttacacaaaatagtagaccaagttttctgccacttttgtgtcacatgctgcccattctctagtgtctagcaacttcttcctcatttccaacgcttcaatattccatcaaaaatattttgatactccagtttccagaagcattctgttcatgatgattatgtaattttctacaattacggaagtagacgtattatcaacttcctgaaaaactcaacagactttacaagtcccccagttctacttccacgtttttagatacgtgttatggctcccgtcctgtacccaatgttggacggactgccctaactaagagccacaaactgaaagcctttaaaacatgcatacacacacatacacacacacacacacacacacacacacacacacacacacacacacacagacagagagagagagagagagagagagagagagagagagagagagagagagagagaaatctatgttatcaaagtggctagaaatacaaggtcatggtgtaggtagaaccatacccacccattttatttgatgctctcccatatgtttgtgtcaaatttcccttttttatgaggatgcaggtcacatgggattaggatccaccctagcgatcacatttggaagtctgttcccaatgggggtcacatcataggtactgactggaggataaaacttcaacatctttttcaggtggggataattgtcacaatttaatacctggcagtggtgataacagatgtgtgtaacatcagccagatcaagatagaaagtatttccaacaccaaaggctccctcagaccctatccaataatccccaacacagcctttattctgaacatcacagctttgttttgtgagcatgatttttatttcatttgttgccatttgagaacctaaatagaagggaaaacttcaaatgcacatcaggaggatttgtggcaatgaattgtggaagattttatttatttgttttttgtttgtttttcgagacagggtttctctgtgtagccctggctgtcctggaactagctctgtagaccagactggacttagaactctcagatatctgcctgcctctgcatctcaagtgctaggattaaaggcatgcaccaccactgcccagcctttatttttgttttaaattgtgtgtgtatgtgcacaaaagtgctgtgtccacagaggtcacactcaatttgaggctaggaacagaacttggtccttgtagaatagcagtatttactcttaaccactgagccatctctccagctccaaaaaggtaattttggagaaaatatctagatagtatgtttatactaaaacattagaagaccagtaataactagaacattatgtagtgataaccttccacttacagggctgggttttagccactttagacataactctactaaaagttcatacttttaaaaaaaatctatttggctgggtggtggtgtcacacacctgtaatctcagcactcaggaggcagaggaagatggatctctatgagtttcaaggccaatctggtctacaaagcaggttccaggacagccaaagctacacagtgagaccttgtcttgaaaatcaaccaaaaaccaaaaacaaaacaaaaagatttatttatctatttgtacatttatttatttatttatttatttatttttgtaaccttggctggcctggaactcacagaaatcctctatttcagccttccaagtactggaattataggtgtgagccacctcattctagctatgacagtatatatttggggtttctgcaaaatttcaagcactatgttatttatttatgaacattttatctacttttataccataaaaacttgttttcatattttaaaaaataggacacattatgtttgcctagcaaatagctaatcccagcaaacaagtgactcctgggtccagacaatggactttggattctcgggttagcatttggttcagaaatatttgctgtgtgatcatttgggccataggcagggaacttgtgcacaaataccgcattgttcctgctctcaagagaattgatagtccttggagaaactgcagtgcagagagagttttaaagcaatgcattcagagaaggtaaatgttagttcacttgggtgagggattatttagatattgaaggtaagaataaacaggggatgggcaaaaacgatcagcagaacagagttaagaaacgggaaagcaagcagacttaaacttcaaataactttttctagaaacagtttgggagatagagttgaacaagtacatctggagaagggtgatcagttaagagtccagaaagtgcaagacatgtactagaagaaagcatggtagggtatgggaggagaggagagatcatcccagagaacaaactagaagatacagccactggcagccagtgagtcactggaggccttcccagctgtcacagctatgcttgcatgcaattgctctgctggttctaactcagtgacacaaccagcctggcatgcagccccaaacacagaaattggagggcaataaggatcccagtgagaaatgaagggttcctgtgtcaatccagaacagagaaaattccttatcgcctcttctcccccttctctatctactcccttttctggttctgcaaatgcagaaagagtccaatcatccttgggttaaaaatccctttaaagaccctgggaagcttcatcagacaggtagggagtgaagggcttgataaagaaaagattgcatatttaaaatgcatgtggcatagttaaaatgtgcgtatagaaataggtcaaaaggccccatgctgtttcactagatgagagtgtgcagaaagtattaacccagcctcctcactgatgattgctcccctatggagaccttggattttagctaagcctacctccttgttcagctgtgtgaccaaaaatcacctcatgcagtggtacataaaatagacatgcagagtttccaggctgctggttgatctcctccagagcatgcagccctccccatgccagcttttctgtatgtgtgtctgtcttgtcttcatgaccttgttgccctaagaatggaactgatggtctgtggagcaaagcaaagcaaagggaaacaatggggactacagagggaaacagacaaagaaagaaaagtgtggccgatgaagagcgatgtgtggatccacttgttcatgacccccaggctatagctcccactcagacctaaggcctatgcacaaaatgaaccactgttctgtgcaaatagcagaactttgggtaatagcttgccctttaaagccacgactatcctggtactctttttgtttgtttgtttgagacagggtttctctttgtagccttagctgtccaggaactcactctgtataccaggctggccttgaatctagagatctgcctgtttctgcctcctgagtgctgggactaaaagcatatgccaccatgcccagctaatcctggtagttcttaccaacttctcagagaaccgtcagagaactgcacgtgttttttcactgctgcgcctctgaaaaccaataacataggtgatattatccctggtttgcagatcaagggccaaggagaagctgaaccctttcaggttcagatacaggctttgggtgtttgttgctgttttaattgaggtgttggggatgggacccacatgtctcatgctaacatgtgctctgctgttgaactatgcctccaactccagaagaagactagctgtcgacctctgagcagagagtgggaatactccagtgtagagggccttcaattcaggtccaacagaaattgagcacagggagaaatctccatctcctgtttcagcccaggcacatggatctctgtgcctccaggactgaccttgaacccaatgctggtcagatctggaaaggcagctgcctcctgtgatcgtaccctactctccagctggtgcgttcctcatctccgctctcccttggcctgggggtcattaggctactcgatagcaccttggccagagactcaatggctaaggaaaggagaagaaggaaaacttaactcaactcttgttatccgaggcggcagctgaaaccaatgcccacaaagggagttttgtgtttcccatgaatttaaaatgttcccgtcactggtgctaccaaatatcctgagctgggtgattaaagaaagaatgcaggcattgtgcaagcagggtagtttatggggaaaatttcatagaacacatttaatacattaaaaccttaatctcaaggagcagattgcaaggagggagggtgttgcatcattgctcctgccttgattggcaggtagagggaggtttacggtaagaagggagctgtggaaaggccccagctcttcaggggctagatatgcagtgtgagtagtcttctgttttgattgacaggcttgagatacggaagccttggctcactgggagggtctttctacacgatgcatcttattttaataatattcatgcacaatcatgcataggcacatgttgctaaaattctttcccagggagaaacataaacaacatatctctctcttttaaggttccaatgacaaacagaggcacaattctgccaaactccctctggggaatcggtgagttcactgggggtctgagtcctcctgcctgccacaggaaagcttttatccagtaggaaggagggcttctctgtagccacatagatgagccccaccccccaccccccgtccatgtaccccaatctctgctgtatattcaagcccccccccaagccacatgtaattaaggcagagttgtgtacaacaggtggcagggagcagtggaatactcagatgaaggtcttgtggccctctccagtcttccataaggaggtataagcagccaacaagcccagctggggtaaaccttttgcaagggtgtacagcagaactccccaagatggcagttgcttgactcctaacatagtcactcacaatagcataggatgctaaataggagattttccctaaaagttcattcacagggcatagttgacttactgtgcatgtatccaaaaggggcccaggctaccttatttcagggtgcttcaggatgtgtttggctatgaaaagggagttataagagtcagtaggtgagcccgggtgttggtggcgcatgcctttaatcccagcattcgggaggcagaggcaagtggatctccgtgagttcgaggccagcctggtctccagagctagtgccgggataggctccaaagctacacagagaaaccctgtctcaaaaaaaaaaaaaaaaaaaaaaaaaaagaaaagaacaagaaaaaaaaatataagagtcagtaggcactacagatcagggtatcctgagtgttttgtttcagggtattgatacaggtgggagtcttaggttgctaagtgcattgttaggaaagatgtgtgtatgtatctgtatctgaagttaagagggggccccagttgctaagctttatctacacttgcctgtcccattaccgtgaaagggagactgactgtattcgggcttgggggtgtagctcagttaatagtatgcttgccaagcatgcataaagccctgtgttcaatccccaacattgcatataagggatgtcgtgatgcatgtctgtaattccagcatccagaggtggaggctcccatatcatataagatttgggggttgtttgaacagcacaggctttctttctttcatatgctctctacgttatgtatagttctacatacaacttcacatatacatgtattatcaataccttcaatctccatgcagagttgagcatttgggattacaatgggtctcaggccatacactctggagtgtctctgtaccagtgactcccactagttctagttggcttcagcttggggggttctagttttcctctttgccctctcataacattttctcaagtgttagttacagcctttgtgtaagtctttcttgggctcagcctcaggcctgctttcctgcctcagtgctcaccaccctgtccacagtgttgaagattcccttgtgaataaaatactcatgagtatgtttgagagagattgcttcgttgcagctgtgactcctaagccttcccggaggctgaggactctgacactgaccatctggagaggccatgcttagcacaggtgtcacaaagtagcagcaattagtgttgaggaattgcaaatgaccaaggagcctggtcctgtcccttctgagttacttccctacattagacaaccactgcaaaagatacccagaagggagggacattccttttccctccagtccgtccttgttggccctttaggaaccagtgggctcttgaaagtatacttactgtgtctgaaataaaaaaacaggtttgttgttttggtccatatttttgatgctctggtaggaacaaaatgcatgtgtgtgcctgttacaacacactcagtgagctcacataataatgtagaaatctaataattccacttgcaaattaactgctcgtatcatttgcattaaaattgatgtgggtctgggaagatgacttggtgagtaaaggtgactgctgccaaacctgatggcctgagtgccatcccagggactcaggtgatggaaggagaaagcctactcacacaggttgtcctctgacatcacacgcgcacacacacacataaataatagatacatgaatgaatgaatgaatgaatgaatgaataataaataaatacagtttaaaacagatttgggggcacattcacacctgtaatcacatgtattgggaacctgaggcagggcaagcttgcagaccacctcgggtaaatagcaagatatattacgataaatgaatgagtgaataaatgaataagtaaacaaatatttaacacgagtattgctcaataaaaggatgaatggtagattcaagctagtcattgaaaatggtttctttttagaatgacactgaataccaattatgagaaaggtttttcattttagtatattgaatggtactttccctgtgttttgatcaaagtcctatttttctaaattttactctgcagcacatgaatcatttagctttccctgtccttggatatgcttccatatttttggaggtcacagccacattttgaagccaggactgatgtatacatcagataattatttctccagcttatcactaataatgacatctgctaacttgtatatgacatttttgctcctgtacttcagtcaccttgtctatgtcatatgaattataatcttcccaatcagaaattcaaaaggcaatactcttttccagactcttctctccttccaaaggccttaccagttagtccctctgctcaagttggaatgtgtcatgcctctaaatggagcctatgcttgacatcctttatcacacaaccaacattaacattgtagatgttcggtattgactagatacaaataccctgcttccaccaagcaaaggaaagaagattttaaaagtcattttgaaatgctgggtagagaaagtgtgtgtttccttcagagtcctgctgtccattattagcattctcccctctctttcttgtccaaatcatacttgtccttcaaggagcagccacatgcgttgtttggcttccagggtgtttgatgctagctcaggctatattcctactggttggtgtcttgatcctgctattcaccagtgtcccttctacctcccttataaatggtcacagcatttgccatcattctgtgatgcagaaggagggacatgtgtgtgtcagagttcccaggaagatctccatgtttgattctgattggctgagctctcagcaacctcagtggagttagattagaggttgactagcttaaactgaagatcatttaaactgaccactttaacaaaggggaagtggagtctactgatgcatttcattttgtattttttttttttttgatgctgggaatggaacacagaaccttgaccaagtgttttacccctttgccccctctcatataaagaaaaggtcctttaaagagaggcttaaagagagccatctcaccagtcccagactcgtttattgtggtgtgactaaacagatgttttccttttcctttaagtaaaaatgatacactaatgtaacctaaaagtctcagacttaatgagtaactctcatgtgtcaggacatcttcaactgataacaataaactttattaaatagcatgtagggctgtgggtattagcatgcttgcaaaggaggcacaaggccctgggttccatctccagcgctgattatagttctagataaacaccctgtagctcttatcaatttgagaaatgcctggaatctggaaagattagttactgcttttaataattccctatactacacaagtgtcacttgttcttcagcaaggctcaaaatttctggctgaaatctagacactacatcttcactaaaagaaagcaggccttttgtgtgaagctttgtttgtctgactggaccgcaggctgtcagtgtgctgtttgctgtcaggttaggtactagaaaccaaggtttcatatgattcatgaggtctacttgtcatggcctctctgttgcctcaagcctccctagagactgctgtaatggtctccggggacttattaaggacttctccccgggccttcctcagcagccctgtagatgaggtgaggcataggtgtgggtgtgctgtgctcatgcagtgagcctgtgctctgtaactgatccttcaccagtgcccctttctctcttgttttaccacctcaggtgagactggaatgttcttactatctgtcttccttccattttgttaggtactatgttctctagagacaggccctattgaagaacagaacattctggacacattttaagatgacagctgggtatggactatatagtcccagccctccgagactgaagcaggggactgaaaagttcaaggtcaacttgggttgtacagccaaaagccaataataaatgtctccaaaaggcaataatgaatgaatgaatgaatgaatgaatgaatgaatgaagtaaatggccctgttccatgctgaaagcattgcccttaacctttactgtgagaacataatagggccactgaaagtaaaactcgaaaaagtttttttatagttgtccaaatttcctgtggaaagacccctctgtcttgtgcaggcaggtggcttagctctgtctccagtcatcatccccagagcacaacagtgggttgcattctgaatgtggactcccaaaagcaaagatggatacctgggggcttgaatcttcctgacagccaagtcaaggcttttctgacttctctctgctgctggaaaagccccacatccatcttcaactctgcccccaagttttaacctagagtggtccacactgagcctccagcagccatccctgggtagtgtggattttcctaacctggtactggttcctctggaagtttcttctcttgagctattgctttgttctctgtaaccccctgcatttacctctgtcttcaagtcagtgggagctgtttgctctttggccatagttctaccacggatagaatggttgattttaattttgtcagctgacttgttggtgagccaaggagatgaattccaaagtcttaggctagactaagaaggagaagactccccatttcattttaatttgacttgaatttcagagatagtcactcaggtatcttcctgaattgggcccccaagtggtagaggacagctgtgtgccactcggctgggttaggcttgagttagagagaccaaggggctggttaaagactgtagcagttgctttttctttctcttctgagcccaagactgaggacatgggacagtggtgattatcgttaagcttcaaaatcatggcaattcttccacatgggcagaattctggctgcctgatgggaggaggtaatgtccctgtgtagggagtagatgaagtcctgaatcaatgtgtattgttggcatgagtgtggcatgtcaaggaccccagtgcttcagacccatgagaatggcaaggccttccctgggtcaggctcggaatgtggcaaggccttcccctggactgaggatgaagtggacagtgtgtatccagaaagtatcaaccacagctttctccttccagaagactgtagcccaagactgctcccctacaggaattccccaccctcccccatcctcccccaccctcccccaccctcccccaccttcccccaccctccctcacagtgtcgttagctaactgctgctttgttcagcagtatataacaaatacagcaagtttctgggctacaggtgcatctccattagagtgtatgggctaccggataccagcttttctgcaggtgtgactgtgtttcttcattccccgtagcccccactcaggtcaatcccaaagctatgcaggtctcagcttccctgtttagggattcctgttctattttcttatactattgcagttaattttggttggatgtcactggataatccatccacctacttattgttgtttctttttcctggctagaagttggagaaagagatgcttttaatttcttttcaagttaattctgtgctgccaatcacattggttagttatctggtgctgcaaaatgcattatcctgactcttagtggataatacaagaaatgtttttttttatttcagtgattgagtcaggcatcagctgcatagctggctcggtctctgaatcagctgaactcaaagcttggctgagggtcagatgcctctaggcctatcttggtgcatatccatctgtgtccagatttgctcatgtggttttggcaagcctcccgttctctctggctgtactagatagtaatcccttgccacacgggattctctctggggaagctctcaatatggcaggtggcatctctcggagaaggaggaagagaaagagagcaaagaagataaaggtcaccattgctttgtaggctaattttggaagtggcatttgatcacatttgctgtgttctgtttgttaggatgaatcactaagtcaagcccacacaccgagggaagaaatgcacagggacatggatgctaagaggcggagatcattccattctcctcaaggctgcctatcacggcttgttaattagcacttcctaatccaaaaccaaaggttcagggcctctcttatgaaactgtagtggatctcttgtgtgggaggttgatttatctgggtgtcctgtagcaggaagagagaagtagcacctggagatggtggtcactgagctaagttagtggtgacggcttcagagacttcaggaaagccacaagttttggtttcctatacagatgcatcatccttcagggcagcagaatttctgatgaaatgtttctatgcttgcttgtagggtctagagctgtgtagaaaccacatggtttcttaaaaggcaaaaaaagctgtggagccacctgcctttggttggctatggttttggacaatgagcttcacagtagtcattttgattcaccaaggatcccatgaatttcctaggcaagttttgacaaattttgtcactgaatggtaaatgatgccttggtagatgctagtattgggagtgttataatccttagtccaccaattgactgatgtgggagagcccagcccactgtgacagtgtcatcctagggcaggtggtggtcccagagaggtataagaaaggggatgagtgtaagcctgggagtaacctcatgagtggtgcttctctgtggtctctgcttcagttcctgcctccaggtttctgatttgagttcctgccctgacttcttttggtgatggagtgtgacctgcaagtgtaagatgaaataataaaaccttgtttccccaggttggttttgcttaatattttatcctagcaacaaaaagtaacaccacccaacttcatgttatgtttgtttgtttgtttgtttgtttgttttggagacagggtttctctgtgtagctctggctctcctgggactgactctggagaacaggctggcctggaactctgagatccactcaagtgctgggattaaaggtgtgcctacccccacctggtccatgctttcttttttatatataacccaattttagcaacatagtgaactcaattagggcttcacaaatgggtgtggggccatccactagagcgtgagaggccctatctcttaaaatcatcacccgattcttaggaaccaacatgtgaacgagggttgagagagcatacaccccaaatcctatcaggaggttagaacaaaaagcaacttttgttttgtcttgactttgagctgggatctcaaatgttttgaacttgctgtatagtcagaggtgggcttgaacttcctgatccattcttcttcctctaactcatgaattactgcagatacatttagttcagaaaaattatgtgtaggaaaaaaggcaggcatgacctggtagctagctgacctaaataagaagcctggaccaccatgcttctgaagtccaaaccctctactggccatgtcttctctagtgtgcttcttccacacagagaccctagagggtaggagcactcactatccaatctgagaaaatgtgctaaccaatcacagttgctagccttccactctatatctggagtggtccatcttcatgccctttaccaacccataggtgttgtagtcttatcaggtgatgtccttgtaatgacagcactgtttttcatggttttctagtttttaattttttgatttcattttacattccaaccacaattctcccttccactcctcctccctctcccactccccttccctcccctccagcccacccccagtccactcctcatgggtaagggatcccatgaggagtcaacatagtctgacacggtagtttggggcaggaccaggcccctctcccatgccttaaggctgagcatggcaccccactatggggagtggactccaatatgcttgctcatgtactgggattacatcatgatcctactaccactgagcatggcttcccaccctaaggaatggcttccaacaagctagctcatgtactaggtttatatcgtgttcctagtgcctggggctcctttgatagtccaaacttcataactgtctcccacatatgtagggtctagctcagtcccctggagtctccacagctgtcaatctagagttcatgagtttccatgagcttggttcagctgtctctgtagatttttccatcatgatcttgacctaccttgctcatatattctctcctccctctctttgcctggatcctcagagctcagcttggttcttggttgtggatctggttccagtaattactggatgaaggttttatgatgatagttggggtattcatcaatctgattacaggggtaggtcagtttgggtaacctctcttctattgctaggagtattacctggggtcctccttgtggattcttgggagttaccctagcaccaggtttctccctaagcccatagtggttctctctattaagatacctttttcattgctctcccactgcatccctctccacctaggccaactcattccctcctgttctcatccctctctctccctcttaccagcccccctccagcctcaagtttgctctgtacatctaatttcccttcccagggtgatccatgtgtccctctcaggggcctccttgttacctagcttctctggagctgtggattatagtctggctatcctttgctttacatctaatatccacttatgagtgaatacataccgtgtttgtctttctgagtctgggttacctcactcaggatgttttttgttagttccattcatttgcctgaaaagttcatgaggtcatcattttttacagttgagtagtactccattgtgtaaatgtaccacattttccttatccattcttcagttgagggacatctaggttgtttccaggttctggctattacaaataatgctgctatgaacattgttgagcaagtgtgcttgtggtatgattgagtgtcctttgggtaaatgcccaagagtggtattgctgggtcttgaggtagattgattcccaatttttcttcgaaactgccatactgatttccaaaatggctgtaaaagtttgcactccctccagcaatggaggagtgtttccctgactccacatcctctccaacatagctgtcctcagtatttttgatcttagccattctgacaggtgtaagattgtatcccagagtcttttatttttttcatttctgagatgattaaggatgttgagcattccttaaatattttttggccatttgagagtcttctggtgagaattctctgtttagctctgtactccattttttcaattgggttattttgatgtctagtttcttgagttctttataaattttggagatatccctctgtcagattcagggttggtgaagatcttttcccattctgtaggctgttattttgtcttattgacagtgtcctttgccttacagaagcttttcagtttcaggaggtcccatttattgattgttgctttcagtgtctgtgctactggtattgtatttaggaagtgcattccaggctacttcccactttcttttctatcaagttcaatgtagctggatttatgttgaggtccttgatctacttggatttgagttttatgtatggcgattagatatggatctgtttgcaatcttctacatgttagcaccagttatgccagcaccatttgttaaagatgttttccattgtaccattttggcttctttgtcaaaaatcaggtgttcataggtgtgtggattaatgtcagggtcgttgattcaattccattgatttacctgtctgtttttatgctaataccaagctgttttttattactatagctctatagtagagtttgaagtcagagatggtgatgcctctggaagttccttttcggtacaggtagctattctgggttttttgtgtttccatatgaacttgagtattgttctttcaaggtctgtgaaggtttgtgttgggattttgattgagattgcattgaatatgtagattgcttttggcaagattaccatttttttattatgtttatcctacctatccaagagcatgggagatctttccattttctgacatcttcaatttctttctttagtgacttaaagttcttgttatacaggtcttccacttacttggttagtgttacggcaagatattttatgctatttgtggctattgtaaagggtgattcctctgatttctttctcagcacttttattatttgtatataggagggctactgatttttttttgagttaatcttgtatcctgccacattactgaaggtatttatcagctgtgggatttcctgtgtagttttgggggttacttttgtataccatcatattatctgcaaatagtgatagtttgacttcttcctttccaatgtgtatccccttgatctccttttgttgtcttattgctctagctagaactttgagtactatattgaataaataaggagagaggggacagccttttcttgttcctgttttagtggaatcgctttgagtttctctccatttagtttgatattggctctttgcttgctgtatattgcctttattatgtttaggtatgtttcttgtatccctattcgttccaagacctttatcataaaggggcgttggatgttgttgaaggctttttcagcatctaatgagatgatcatgtttttttttttttttttctctttcagtttgcttacatggtggattacattgacaaatttctgtatgttgaaccaactgtgcatctttgggatgaaaccttcttggtcatggtggatgatttttttgatgtgttcttggatttggtttgccagtatttttattatttttgtatcaatgttcatgaggtagactggtatgtaattctctttctttgttgtatctttgtgtgttttgggtatcaggattactgtaatctcataaaaggagtttggcaatgttccttctgtttctattgtgtcaaacaatttgagaagtagtggagttagctcttctttgaaattctgatagaatcctgcgatgaagccatctggtcctgggctttttttttttttttggaagacttttaatgactgcttctatttccttaggggttacaggtctatttaaattgtttatctggtcttgatttaattttagtatgtggaacctatccagaaaactgtccatttcttttaaactttccaattttgtggaataaaggtttttaaagtatgacctgatgattctctggatttcctcagtgtctgttgttatgtccccttttcatttctgattttgttaatttggatatactcactcagtcttttggttagtttggataagagtttgtctatcttgttgattttctcaaagaaccaactctttgttttgttgattctttctattgctctctttgtttttattttattgatttcagccctcagtttgattatttcctgccttctactcttcctaggtgagttaacttctttttgttcttgagctttcaggtgttttgttaatttgatagtgtgggatttctctaacttctttatgtaggtgtttagtgctatgaactttcctcttagcactgctttcaaagtgtaccataaatttggatatgttggacattcattttcattgaattctaggaaatttttaatttttttctttatttcttccttgatgattaagttgggaactattcagtttccatgagttttttgtaggctttctgcaattagtgttgttgaattctaactttaagccatggtgttccaatatgatccaggtggttattcctgttgagatttgttttgtaactgagtatgtggtcagttttagagatggtcccatggggtactgagaagaaggtattttcttttggtttatgtggactgttctatagatgtaagttaagcccatttgagtcataacatcttttggatccccaatttctctgttaattttctgtctggcagacctgtccactggtgagagtggggtatagatggaagtttctgtcccgtcttgtctagaagccatttagtccctgtgtgttagtgtgatttaagctttagtaatgttttcttttatgaatctgggtgccctcgtatttggggtatatatgtccaggattgagacttcttggtggatttttcctatgatgaagatgaaacgtccttcatcatctcttttgattacctttaatttgaaatctatttcgttagatattaggatagctataccagcttgcttcttaggtccatttgattggaaagtcttttcccaaccctttactatgaggaaatgcctgtctttggagttgaagtgagttacttgtatgcagcagaaggatagatcttattttcatatccattctgttagcctgtgtctttttataggtgagttgtgtctattgatattaagggatatcaatgaccagtgactgttgattcctgttattttttgatggtggtggcatgtatatttcctttctttatgattttctggtaagggattatttattccctgtgcttccctgggtacctctaacctccttgggttgtagttttccttttaatgctttctgtagggctgggtttgtgaataggtattgtttaaatctggttttgtcatgtaatatcttgttttctccatctatgggtaattgaaagctttgctgggtacagtagtctgggttggcatccatagtctcttagagtctgcatgagagctgcccagaatcttctggctttgaaaatctccattgagaagtctggtggtgttctgatgggtctgcccttatatgttacttgacctttttcttttgctactcttaatattctttctttattctgtatattttgtgtcttgattattatatggtaagagaattttttttggtccagtctatatggtattctgtaaacttcttgtatcttcgtaggcatttccttctttaagttgggaaagttttcttctatgattttgttgaaagtattttctgtgcctttgagctggtattcttcttcttctatccctgttattcttaggtttggtctttttatggtgtcacggattttctggacatttgtgttatgattttgttggttttaatgttttctttgactgatgaatctatttcctctatcatatcttcaacacctgagactctttcttccatttcttgcattctgttgattaagcttgcatctgtagttcctgttcatttacccagattttctatttccaggactccctctgtttgcattttatttattgcctccatttcaattttcaagtcgtggacttgattgtttttttttcttggctttctttaaaggatttattgatttcttacaattttttgtttgtcttttcctccatttctttaagggaattcttcatttctactttaagggcctccataatctttaaaaagttattttaagttcattttcttctgcttctgcgttgacattttcaggtcttcttgatgtagtactactagcttctggtattgccatattgctctttaggttgttgaatgtattcttgtctacccatctcttcttcccattggtgcaggcagtgtgtttgcctcttgatccaatcctctcagtaaactctctcagccctctctgtgcagtggatgtctgtgaccccgagggctgctctgagtccttgctctcagtcctctctgtgcagtagtctgtgtcccagggagccactgaggttcaatgacagcatttatgtagtctttgaaagttaaatttctattggatttatttatttttgtatgtgtaggggtacacacatctgtaagaaggttggacaacttgtaggaattcttcttccgtcatgtgagttccagggatcaaactcaggtatttaagcttggcagcaagaacctccacctgcccctataactctataaataggtgttgctcatgccttctgcaggagaccctgcagccaagaggagtgaagctatgcttgttggactagtgtcaaagcgaacagaagctggagcatcactgcaaactgccaggaccctttgcactctgcttgcctgattaaatacaaaatgaaaggcacactgaatgtaacaggaaagtcaagattgccgccaggctgcacagctgtttcaggattcagttgctggcctctattcttctgtatctatgcttcttcatgtctaagttccttgggtggtacggtatctttaagcaagttcaaacctacaaccttgcagattcaagtgccctagaaaacatggtaactaccacaaaaagctcctgaataatctccttgccaggttccaatcacatgactattcatcttggaatttttaattttttgagacatggtttcactatgtagccttggctgtcctgaaactcactatgcagaccaggctggcctcaaattcacagagatctgcctgcctcttgccttctgagtgctgagattaaagttatgtgccaaccatgcccaaccatctctaaacctattatcagtggttggaatggtccttttggctagatctaggacagatttccatttgaacaataaaggtgactgtggggccaattccacctgtacatgaaagtaatttccctagaaatgagtgtagccaatttacagatacaattgattcctaggaaaagaaataatggatatgcagtctctgtcttcagaagtctcaaagttttaaatgtgacaaacattttaaaacaacttgccttctaggctagtagcacttttggaaaagtctcaaatctctggctacctgctctggcagatgctttgtgggacggagatgaaccatttctcccaagtcttgcctaagttgcagactaggtgatccaatgaatgattgggattatcccagccactcagatttagagccacaatgaataaatgatccaaggaatattagcatcctcaagaggagtagaactgatagaatgaacatgtagtgtacagggattgacaggattagcttcctgaatggagctggttagtctaacaatggctgtctgcatgctggcaaaaccaaggatccagtgagctgctcagatcatgaggctggacacctcagcagtcccagtgtggcactgaagaccgggtggtggtggtggtggtggtggtggtcccttgaaagcctctagtcttctgtccacattggaaagccaaagaacctgggctctgatttaggaggaacatctggagatatcccaggtgctgcctgctttcacaactgtctttcagccctgcagcagagacaacctctgtgggcagagtaccattgtcataccagggacagtcagtattattcagcaggccctttagaattgagaatagcatttgaaaaagattatcccatgcaaagtcatcaactgctgtgtacttattgcacttaaaacaatgcaacactgattatatttgtagtttatgcaaattacaaatggcattggtattaaatccttggtacttgacttcacttccaagtgtttcttagttactctattcaaatgaaaaaagtagatttaaaaaaataaagatatgagtattcaagtatgaatgtatgtatgtatgtatatatgtatattctctccaacaaaatggggagtcatatctacagcacattaacaaacagttctttctgtacatgatttttaaaaagacaaagcacattataaagtgaaaaaaaaaaaaaaaaaaagaacccgggctctgatgggagtgaaggatggacacagcagtagccgtgcagattacatgcattcaccaggaggtagtaaaggcaggcagggaggcaaaagcagccctgctttcccctcagacaaacagaaggtgctgtcagcctgggcaaggggttctctacctcatctcatccttcctgaaactccatctagaagcatttctctcagttgattccagattcattcaaatcaacaaccatgattagccatcacacaagagggttttccatttttaaataacaaatacgtttttttaattaaaattctatgcctaatttggaagggaaattaaagtttaaaacattgcaaaagtttctatttgtgcttccattacttcacccctaaattttcaagtcttctgttggtcacggatttccccttcccagctattacagcagcagctctagttctctcaggtcagtttacatggaaaagaacaggagccagagcaatggcggaagctgtgcatagtttctaaaggtggttggtattggcaagtttcaatttattggttatttctttcctgccggttccttacagatgctgccgtcttgtctccaaagctcaaagcaacagtctgaccctgaacacattctctttgaggaaagtctcttcctgaattgtgtctttttgtatgatttacccttacatgttgaaggtggggctgaggatgatattgtttcctctggagagtgcattagccatttctttactcccaggaaggacttgggaaggccagctctccctgtgcagttaggacagctgtcctgtctgaaggctagcctttaatgactactgcattccccaataaactcaaaagaattttctgttacttttaggaattattttaaaggtgcccaaggaggccagaaaattgcactggatctcttatgggttgttgtgagctgcctgatgtgagttctggggcccgaaatttctgcaagagcagcaagcactcttaggtgccgagccgtgtctccacacctcctcccattctcagatctcaggtagaagtggctagcaatagcaactaaaggacagtgggggtggatagctcttccagatgggtgtgctctccatcacagcacgatggactgctgcttgccctctccagccttggagtagagaagggggcaaggagaagactgttttagtcaaaactgttgaacttggccatagctcaaagccagaacacctgggagagctcaggggaaccactctctagagctgtgcatttgggaaccaggcaccctgtggtgacttccttttctcagacataaaatgaggtagaaaactcaactgagttaactgctgagaacatggcttggcttggcttggcattccaggcatggaaacagtaatagggattcatggggatttgtggcccgggatcactaactggcaagtacatgaaaaatttcagatgtcaaactgaaaaattataagccagtaaataaaaataatggctaccttctctgaaaaaatgaataaaacatcatagccaaacccatgaaaggagaaatgcataatatgcttgcttttgagaaatgcaaatagaaacaaaaatatgtttctctaccagaacgatcaagattaaaaagcttttaaagcccaatgctggtgagcattggcagagcctctctgtggccaaaccctagctgggttccctgcaccctctttgacttcaagctcaacctgtaaggcacaagcttggcagcatagatgagactaaacaaacactaacctagcttgtggaagctcaaggctatgtcctcaggatgacctcagcccccttagcatggctgcccagggaagctccaccctggcaaagaaagctctgtaatttgaggagcacaggcccctcaccactcccaccactgattaacaagggctcatggttgtgaatctgctccctaaccacacactttgagataagttcttgtgtgcttcttggaagttatctgaaagatttctgcattgggaaagatgttcagaatacaagatgtccttactgtctttttgtaggttgtgatagacaagtatatgtgtgtgtcagaggaattcatctcagaaggttttccttaaactgaagggtgggctacatggcttctaccctctttcctggcattgtgttttgatgtatttagtagtaaaaagcacatgtctttcctctaagaagaaaagaacatagtctgttttatttttatgctgagaaaatgtattacaacaggatgtgagagacactgagctgggtagggaccctggatttgtccctcagtggtctcactgcccaactctgataaagaggacatcacagtaatgtcaagttccagctgcaggttcaagtgatgacacaaggcgagattcatgctattttgtcttctttctacttttcatattttttagttaaacgtaaattatgaatcactgccaatgatgacaaagaaccagcaccataaacatgagtttattatgtttataaaacaaattctggatagccaatgtagattttaatttttaaaaagttatacacatatttattttatacttacttggacaacttggagcaattggttctctcctaacatatgggttcttgggatcaaattcagatagtgcctttaccaactaagccaccttggcagacctagtatgtatttttgagaatcacttttaggtgagagaataaatttgaatgtgaaacatgcgaatacctcttataatccaaggtgggggaatcctttctctgttaagttcttctagctgtaaaactatttgtgactctgagagtatagtgttgctcccatggaaggaggtccattgttcttcctggggctactgggtgggaggtaaccctttccagtaagtttccaaatagatgagctccaacacctgagctttgtagggttgttgcccatcacaggggacaacacttcagagtagagctatccacagaaatgaatcaaagtgacagcagagagaaaccaagtcttggttgtgagcttttgttagaagaagtttgactcgactcaatttaactttaggttgtgttatcatcacttatatcctcaaggttattgactgaatacatgacccttctaggacatttaccacgacttcctagcttgatgacacacctctggtccatgatccccacgatcatggacccctgagcctgatctcccctcacctttatttttattttgtgtgtattcgtgtttgcccgtatgtttgtctgtgtaccatatgcatgcagtccctgtagagtcctgaaaagggcattggatcccatgggatgggaattataaatggttgtgagccaccatataggtgctggaaaccaaacctgggacctctggaaaagcaaacatttctcttaaactctgagacaactgtccagcccataggcttggtctctttgttgcatagttcactctgccatgggttctagtttttgagagtctaaagtctcctacctcctatgtaggacctacaagattgctctagctacagagaccatttcccaggtctgtgtcacaagtacccagctctgtggcgtgaacttaaaatatatttaacaaatgttggttaagtaaatgctgaatgaacatgaaaattagaccatgagcattcaggaagattcctgctggagaaaccatgagttctaacacatacaattcagaattcttccagaacactaatgtcttaactattatgttggccacacataatttatatggagactttgcttcttgggtgtggggaagtagagggatgaatagcttcagtatggagcctaaggatttagacactaaacaacaggatgggtattgttgctaggttaaatactggcaacatactagagactagtagaatgggcattatgctgtatataacatgtgagaaagaccaggctgttgaaaagaattcttttgtgcagagtgcctgtgactaactacactacttacttatttgcctagggcatttgtatcagtcttgtttttaggcttcctaggtcaagatatgttcttgtctggtaccaaggtccaactggctgggagaacatacatgggatggtgttggggtacttcaggatagaaaataccaatatgaactcatgggcttaatacttgtagaaatagacataatgattgtgtgtgtgtgtgtgtgtgtgtgtgtgtgtgtgtgtgtgtgtgtgtgtgtgtgtgtgttgtctatctctgtgcactaagaatcctgggagcagtgatttcctgtttaacaaagagcacattcatccagggctctggaaagaaattggggaattcccaggctgggctgtggataattacagtcacatttagaatatcttgtgccagggtagagaattgttccaagactgatgaggacttatcaatgcacacagaagccagactgaaacagtctgattacagagaacgatttgaggaccaaaataaataatccccacttacagagagcctgttgaataaagtaagattctgcaagttcatgctgacagaactacaatagtaaattaaaagtttgatgggcaacaggctatgtatgcatacctagatctccactataataaaatcattaattacaagggacagaaaagcattttctcagtgggaaagccttacaatactttgtgatcaagtattcaaagtgagcatttacagggtgtagctggaaaatcattagtcagttttgatgtactattgccaaagatgagtaacctgaatcctacagctacagccaagctgagggacacaaaatggaacaactgtaacattcgcaaataccagggcggcagaagtcatggaaagctgcaggttgaaggaggctaaagaggcacaatgactaagtataaatgtggtctggattatgaccctttctataaaggacatttattgagacaatgggcgaaacttgaatgacacagggattgaataggatcatgttgcaatgatagttttcctgatgagatgtccttgtaggcaggatacactgaatactggctgatgatgaggaacgctgtagacaagccactcataaatgtcttcttccctttccttccttgcctctcccttccttttatattgtctgctgcaaggcactgaatctggggcctctgaaacgtcgcatgcccgagttatagctctgtccctgttcttgcaatgtttgggatcatcactaaacaaaagtgaataacaagggctacagaaatgacctagcagttaagatcactttctactttcccagaggactggagtttggctcctggcctccatatttgtagctaatagctgtcttcgactctaactcctggggatctgacatgaacctctggcttcttggggcacctgcaccacatccaaacacagccactttcacatgattaaatacaataaaaataaatcttaaatcagtcaaaatctaaaaccaagaagcaaatagcagaaataagaattttgaaggagtattgaccggggctggactagcatggctgacctagctggttttttattgctgtgatgaaacaccatgaccaaaagtaaaattgggagggaagagcttatttcatgttcacttccttcagggatgaacttccttcagggaagtaatgacagaaactcaaggcaggaacctggagtcaggaactgaaacagaagtcatggaggggtgcttctttctggcttgttcatcatgactcgctcagcctgctttcttatatacccaggagcacctgcccaggggtggcaccacccagaatgaacaatgatcagttaagcaccagaacttgcccatcaaggaggggcattttctcataggaaatttccctcttctaaaatgactctagcttgtgtcaagttgatattaaaatcaccattacaaaggctatcaaggtaaagaaacttgtttgtttggaggaagagtcaaaaagaaaatgagattcaggcatggttggcagaaaccaaagaagaggctagcaatgggcttggagatgagctgactagcaaatactaggacagtgctgggtgagggtgggggagagaaaccatagttttgtgggttttttgtaatacttattaatctgtattaaaccctaagatggacatttaattacagtttaaccagtatataaatatagaggatgaaactttgactcacatattaaaaaaatggacaaagagaggctcacagaggttaagcaacttgttcaaagtaatacacgctagtaagcagaaccaagatttaaatcccagcatgtatgctctcaaagacaatgagagggtagagaaatggtatcaccaagctagggaagacagcttaacctttgctcccagacactggaaaagtcatggagactgagatggaaaatgatggtttaccatcactattgacaccaggaggtgagtaatctgaagaaatatgtctgtcgaattcttggggaaacagaagaaaaagcaaaggaggaaaacatgggcaaacacctttattaataagtgacaggaagcaggagtccaaggaatttgcagagggcttgggggtatgacaaaagactttcggggtggatttaacattcccacttcctggtttatatgcttttatgtctgttcctcactggggacgagacttgcttgtgataaaagaatacgaaaacttagaaaaatataacttctgtgatggatggcattacacaaaaattgtgccttctatcttgctaacctctgcgcctcactatctcaacaagttttccatgttagacagatccacaaggcaagcaggtaagctgcctggattctgcctcagtgaaaccttgatggagccttgctagacaccttgggccaacaccagtttgtacctataagacaagccagctataccatgcttagctttctgacctccagaaactgaaataactatgtgttgctagaaggtgctggggtcattggatagattatattttcaatattcaaggactctactgttgaggatgaatttgcctaaaatctatgtatatcctcaaatcaatccttacggtattttcatggtcatttatgaacatgtgcagagtgggggcacatttgcattgcctgagagaggaactccagctgaggttgaacaagtagggctatgccttttcttcatcttgcctgctataaacaagtgtcctttcctatggttttccttgtgtcctgttttgttggtttcatgatttaagaggactcccaagtgtagtgatgaagtactgcttagcatttttaaatgcacgagggctgtgaagtgtcttcttttgctattgtgttgctttgatgcttggaatcagatccagggtcttgagtgtgctaagcacttgcctcacacagctacacctccatccctggggcttgtcttctggagagactacacatgtagagaagctcggctctggctgggacacattcaagctgttgggtgtgaactcaataaaaacgtgtttttaaacacacagacacagaaagacagagatagagagacatgcacacagaaagagtgagcaagccactgtgttggtcagttgatggaaatgctgtaactagaggtccctactaacccagctctatgcctcttccctctacgatggatcactaattcatgctgtgttgatttcataggacagaactatcatggtcaatgagaatcaacctcagcttgttaatggcaatagataatgaacatgatggacaactgggtaattcatctcgcccacttaaggggggagagttgtgaaaggaaatcaaggtcaagtgtccagggctgtctgtccctcactagggacgagacttcagagacagagcagttatttctgtcaaaatagttatatactgaaaagaaaaaagtttcctgggtaagaaggttattttagggactggaaagatggctcaggccaggcaatagttggtacacacttgggaggcagaggcaggagaatctctgtgagttcaagccagcctgatctacagagcaggtttcaggacagccaggactgttacacagagaaaccctgtttcggggtggggactgggggaggggagttaagagcacttacagctcttgcaaaggacccgagtttgattccagcacccaatgttggctcacagtcacttgcaactccagttccaagggtttttggtcttcttaggcactttgtgcacaatagtgcacatataggcaggcaggcaggcaggcacgcacgcacacacacacacacacacacacacacacacacacacacacacacacacacatgcacacacactaaaaaatcaaatagatctttaaaggttaatttgggcaaatgtgaatatggctatctaggacattagccccacagagcctcttccactctgtaaagcccaaagctgtgtttgggtcactactttaaagtcatcagatgaattcaaagttccatgactgtctagaaagctgcaatgggtggggagcagctcttggccaggcttatgcacactgacagagccaatgcagtgaaatggcacaggagacgatgcaaaaggaacagccccttggagactcagatggcctaagcacagcttttccatgacctccccagaaaagcaggctttgatggctgaaagcttattcactctataagcctcccttttatttgaattattaattaggttccccatttcacccctcatctcacaccctgcactcactccaacgagtgggctaagtccttgaaaacacatgggtttgcataatgcctgtctttgtttagcatgtgtgtattttgagaatttttttctctctcctacctctgccctgtgatttaagtgtttctctgaatgtgtagcttgttgctcttcacagctgtgccatgtgaaattgcacccacctcattctacccaatctacccctagtttccatttccttagactgcagcagcaaaatgaaacgtaactgtccactttgtcacagtctggcattctttaatctgtgattagttcagtgttctcttttagtctttcccctcctttattctaatccaccagaactcatgctgagaacacaaagatcctgactttttgttaatgtgtttgtaaattcagagtgctgtgcctgcaggactgtgattctgggctgactatatgtggtgctgaggattgaactgagggctttgtacatgttaagtgagcactctacctactgagctgcacccccaacctcccacaactatttatttagttaaaaagtgtaatagtggtttctaactctgactggttttgcctaaaagctatgaaagttcaaaaaacaaaaactccagaaaaacaaaacaaacaataaaacaaagggagaggagagaactgaggttaaaatgacaaatgaatgccagctgggtggtagtggcacacacctttaatgccagcatgtgggaggcagagtcatgcagagatctctgtgagttcgaggacagccagcatggttacacaaagaaacccagtctctaaaaaacaaaacaaacaaatgcctctatgcatgcctgtgtgcgtgcgtgcgtgcgtgcgtgcgcgcgcgcacgtgtgtgtgtgtgtgtgtgtgtgtgtgtgtgtgtgtgtgtgtgtgtgtattttgctggggatcaaatagagaaccttgttcattccaagcatactttaccactgaactatacccccagccctaagtatatttaatttaaaaataaatatgttataaaaaggcaagtgacagagaaaggttcaataaagtaaccataaagtaagggaatagttctaaaatgagaagctatttagccaaggaataaatgatacattttgaaggtacaaagaactcccaagacatgaaaggtgatactagaaagagaatattatagtttagatggccaggaaagccacaatatatacagtttgtctgtggcaagggccaagcatatcatgttcctgctaaggaaggccacagaaagtttcactaagttgaaaaaggaaaccacaccatgtggaatctatttttatttctgagttacacagccagggtatatagctatatgtgttcttacatattttcatatttttgatccatactatttaggtagtatttgtttaccaaaacaagtctaatatatactttactctgagcaatccaatacatgtagaaaactctttcaatatataaaaggttaatttgtgcacacacagatatcctaaagtagcagaccacaggggcattgtgataagacagtagttatgcagaaccataaagaaatcctcaaaactacatcctaagattggaggctaaggagagtgacgtccttgctcatcagtatgccctagggaggaaccttatataacactgtatggcttcaacaggaactttgggacttttcatccctagttgttgccctcaacatcccactcttcatcaactactttctgtgcagattgttgttccatcccttagtctaaagctagctaaacagtagctgctacttagaatgaaaacaccactttggccctgatgatgccttggtgttccctcaactacaaattgacaggaaaaagtgcaaagcagttcctggcagtctgaaccaaagcaagaatgctgagggtgcaggcactagagtggagcaatgcaagagttatatctacctgtttatgggctatttcagggatttgccagaagtctattgagttgatgaacatggtagcttttctctagtacgtgcagttaaagtaacttttttttgaagataataagatagcataagcctaaacattggaatggtattacagcccagggtattccaaacatcatttatttgaaagatgctcacactaaatttactatgtcatgtcacctgagtgatcttccatacataggctggacaagttcaaagaaagtgtaaatggtgggattgttaccgtacctagttggctgtgcaaaacaatctcttccaacagccccatatctacagatttctgagttgaactctgaggtcctcatgacttcatgggttcaacacggctggggaatctgtaattcatcttccaaatgggataggaatggagttaatgtgttagacacgtgagcaaatgagagtttaattgggtagctatttatactcaagccaccatgatgttcattcagggttggacttccaaaggtcagggcaggctgtgaaagcctgatactggtgttttcctatgaaattagctaaatgtaacgaggagggagatgaaaacaaaaacaaacaaaggtcagaaaagataccaagttgaaagggatcaataggtgaatctagaaggtgatgtggaggcttatgaagaaaagggaactggcccatatatatggagtgagctcagatggaagagcagattagaaacagacgtgaatcaaaaggacccagagaaacccatcacatgcataactaagtcttgctgtgggacttctccagggctcagagtgtagacagctctcctcaacacagccagcaggcagggcccgtcttcatgccatcttggtgcctgccagctgcctggtaacaggtgagtttggagaatgaccctcaagaggagctttctggatagcttcagcttgagtctggccattgcatgcttctgtgagaagggcccctcacttttctcagtaggccatgggtgaaattccactgtctgtaaatgtcaaaattttctttactaggccagatatggtggtgctataatgccagcacttgggaggctgaagcaggaggatcaccacaagtttgagtccggcttgatctacatagtgagttctaggccaattagggctacctagtgagatcctgtcaaaaaatgttttcgacaaaaccaaatgagtttacagctgcttctgcccaatcagtttggcaaagcatttaaatagatacaagaggtgcagaggccagggtgggattgggaggagtatctggtagcgtagggatcagcatgttttgtttgttttctcctctactccattgtcactactccattctggagaggaaggcgtgaaagaagtatcagtttgaaaacaaatgtgtctccctgtgtttcagttgcattttatttgaggatactaagatctgtaaaatttcctagtacggttaaatatggctgattgaaggaaaccacctttgcttgtagtggagccctactttatttgaggacattaagatctggaaatttgctagtatggttaaatatggctgattgaaggaaactacctttgcttgtattgcagccctaccctcagcatagcttgccaacctctagagatccacagattagaaattacactggcaatttaaagggtatagaaaaacaagaaacgaactatttcataaaggctagtatacacttgcatttaattttatacctctgaaagcaggttgcttttgcaatgcacatgagtgttaattttggatgattcaatgttaccaaattatgtttgagttggccaccttggagttggcacttggagtttaaaggtttgaacctgctttgtggcctgaagcatgatagttagctattgacaatttgatgttcatcttaactttcacaacatgaagttctccaaagatcattagtgaaataatgtcctaaaagagccattgcatgcagctatgtaaagcttacatgggttagaaagtctatgttctccagaaaatttaaagaagactcaagtggacagggagggagcaggtaccttagctgatgagggtgtcgtagctgcctgtctcagcttttcatagagtttctagagaactgcattcccaggacaaggcaagccctttgcattttaaatctagaacaagctctacagggaaattcagtcagactacggacatgcatcctcatctgtctaacagcagagttaggctatgcttttggtaaaagccagtctaaggaaccaagtcccactgcaccaagggttaacagaatattaaaatggaaggttctattttcttgctaaggttcaactaaaattgttgaggcacgtaattggcaaaataggaaaatacacaacatttcataaaatattttaacagtaaacaaattcttttcatatttatcccccttcagacatttccaatggcaccaggtggtgcaggaggtgacatgagccccgtctcttccaggtaggcatgtcagcagaaccacgaagcaggaagtgatccctcctccagccggctagctagggtttttctttcagcttcaggtcaatactggtttggagaggacaggggagagaaaacacaccaaataaagagtgttcaataataattcaggcgtcattcattcacatctttctttaaataacttaaggaaaccacctaagttttttatgctagaaaaccatctactagttgttaagtttttctataaagtattgaatctgggggctggagcaatggctaagatggctccgtggttgagattactggcagcttgctcttccagaagacctgggtatgattcccagaaccctcatgaccattcataaccatttgtgactccagtcccatagaatttggtgccctcttttagcctctatggacacaaggcatgcacatagggcacagacatacatacaggcaaaatacacgcatacacatataaataaatattttaaagatgaaaatattgattggttctttttacaaaattgcttctggaagcattttccaccttttcaaaaggacccagaaaggaagggttcatgttaagcctcaaacctaaagtcaaattggataaagaacattactatgccttcctgtttttagtggatcatttttctttctgtgatagtttttggtgtccacttgactggagagatagtacagaaccccccccttctctctctctgtgtttgtgtgcacatgaatacatctaccacgggagtctcaactgagtggtaaagatccatcttgaatgaggttgtcactgtctaccagactgggcactgtaccgactggaaagcggaagaagtcagacagggcttgctctcttctcacactgtcccttcctgtctggaagtcttttctcatgcagttagttgcttgtggacctcagactcagggatctttgacctttgaacatcggctcataccagcagccctcgctctcaagagacttcatccttgaactggggctgcgtactgatctctggggtgtctaagcagcaacttgctttcatggctttcctagctcctctccaacatggagtgaacattcttggagttgcatgggtctctcctctgccttttaatgaacgtcatgcaactgtcttgtacattcaccacacaggaagagaacttgagccagtgaacagccaaacagagaactccagtcattataaaaagaggaacgagtaatttgaaagcaacatgttaagaagtctggatttctctctgcccctctgagccaccagtctgcctggggtggactttcttgtggcccgtgtggcaaccaagtcttctagtaacgttacagacaaagctactttaacatggaccacttgtctgtctagggtgccctaatgtgatatttttcctttgaaattccctcagtgcacatttgaccacatcggctccaccccccatttctggattgtatcccattgagatagtttggcacagtctgtctcacggctagtaaaggagtagttctaacttggcaataatcttctttgcttagggagtttgaagaaccggccatgacagatgtgatgaggggccagctcaaagggaatcaggcactggcaacttatttgtttcttgtgccttcaaggatctgacttgttatctgcaggactttccttgggtggtgtcttcattcatctgccggactcccatatctgttcctaacatacttttacaaagcaggtcagttttctttcttaattgcatttgcttctatgatgtttaaaatatactcagaagttagtgctaggtctcagctggtagctgaagttttatttattttttttctctcatgcagttggctcagttttcccctgaaaacacaaagacattcactacactcaaactccatagagtttaaagtaggcagtctctgtgctttgcaatctgggcctttgacaaatacctgatctgacattctgacatactagaatgtacatctccaactctccgtctctctctttttctgagtcctttgtcaaactttctggggtttatatcaatgctttggttttgggtaaatgaatagctgagagactaaagcctgtttacccagtgcatgcaaagagcaacctgtggacaacttcctgataagtctacacaggaaaccactctaccgattgcttttgagacaagagctaccatgtggggttaatgaagccaccaataacgcatctaattttaaaaatgcattacaaatataaatagttgtgctacaactttgtgatgggaatgaatataacccaaacctaaagtaaaggagaaaagcaagaaaagtggtttgctaacaaagtatcccttttgagaatgacacaccaatgacaactttggatcagaattgaacatggatgggggattcatcttgtccggggagatgagcttagctgttcataaccaacttaccaagctggccctgcacaagaatgacctaccattcagtggcaggctggtcttactttttgcatgcattaagtgatgtaccttacaaggtatatggcaatcctgtttaatggcagttaaaaatactcatgttttatggaggagtggcaaggaaggtgtaatgtcccttctctctgtggagaatggggggccgctataggacccttacatatctcatttcactttagtcttagcccaatggagccccttgaaagagcttgtgcccaatttgcacttcatccattcagtactagttacaggtgtaaaatgcttccatgtaggatccttccacctcccccaaagccaggagaaggtggacaaagcccacttgttcattccagtgttaaagcaagtaaacaaacaaatgcaggtctagaggtcaggggagaaaattcttgcccactctggttccccttctgggatctcatcctggtagctggggagatgatctgcttggtaggagctcaggaaagacagggatgaagaacagggaaacttctagagcatatgttcttccaagaacgggacgtaacatcaacagctggcagcataccccctccccacagccagccctggaaagagcccaaacaaaacagatatgtcctctagaccaaccccatagtcctctcaccaaggacgtgcacataaacaaggcaggcagagaagtgggtaaaccccaagatgtagcagcaacaggccaatgaagggcaagctgaactgtgggtggccttgcaacaggaggaaatgccatgcttgaaaaatggattacaatggactcagagactgagatacgtttgttttgcaaaagcaatttgaagtaattggtgctgtcatctcaaaatttggaacaagagtgacctttaggaaatagctacatgatttggaaagttcccttacaacagttatcttgcccttagttccttttttgagttgggactctgttttgtccctaaacttcctttaagccttaagggcaacaaggcagatgcagacgctgcactgtgcttttccaacttttctttggacttggaggagacaaacagtggtaagggagataggttttaagttgatctttgcttgcctttcttggtccctgggaacaaggacaatcctaaattctctaccactaaggttaaactaggggcctcttgcctcatgtcaaattttctgagattatattactgaccaccgttacatgaaactgacttgaccactcctatgtgagcagtttttgtctttgttagatgagaagcagcaaccacagcacagaccacctccctgatttgaaagccatggatctgcaaggtcatacttcaaatcccatcttgggacctttttaaggactgcaaaacattagctagtcacatgctttatgcatagttcctttttctctgtaaaatgtacttcataagcttactctaggatgaatctcaggcactgtgtgtgagctgcttcttagagtatgacataggctaaggactctatgcatgtccagtttctatttcttacaggaaagtcatatccaactataaatttccagaagtcccaggcaggttcaattgcctcttggaatttgtaaagcaaagatatttcttccctatccaccaaaatattaaatccacatggaagactgagcttttcctaactgcaatggatgatgtaattctgaaagcagagtggcattccttttgccccagtgtttgtacaactggcccccaaacatttttggagtgggaaggaggaacgttgggttaagcattcagttgtcctttgtggcaatcactaagacttaagagtagctggcaaatgtctctgtaattagtcattccagaaacagagcccatgaaagctgcacatctcaacgggtttacccaatcctggatgcattggtttccctttgagtccagccatacaatactacaggtaaccacatggtgttactgatggtgagttcttactccttctccatagaagtcatttccggatcattgtaaaggcagctagttctgagtgcaagggaaaacaaacaaacaggaagtcatcaacaatttctcactcttattgccatgtcagcatcactggctggggcatttgaaactgtttaatgtggtaccatttgctactcctgtgatcccaaatctataccagaacaaatgatgctattaacttttggcatcaggtttgagatatagtcattaatcaagatacagaaatataaaaagataatagtaacaaaacttcaaatacctccagtatctgtccaagccactttttcttacttttcagatctgttcttatgcagtgaatataaatattgaaaatgaattttatgtactaaaaacaataaggaaatattttatacccaaaggcaaaccttttaaacagctgaattttgtttagacataacacagcagccttcaggcttcacaagaacaaggattttccaaggcatggaaaaaagactgcctgggccagctctgcttcatgtggttaacaggataggggcaggacacttactactccctggggctgagcagtgcttaggtggctctcatgaatcctaacactatctaagtggcacagttccaggaagaaaagtgtagccattaaaaagaatgcaatcaaaggttgcaatagagcgtaggtctttgtataacttagctgttcaggatatccgtatcagtgtgataactatgctaacagacttcaagttcaccttatatcaattcttaatacttagtacactgcagcttttactccccccctcctctcatgatttttttaaatgggaaaaatgattttaaagattctatgatctgttgtacttatttttaaaaaaagatttaaaatgtacgaatgttttgcttgcctgtatgtatgtgcactacatgtgtacctgctggctgcagaggtcagaagaagttgggtcctcaagaactggagttacagtgaacttccatctgggttttgagcacataaaccaggtctcctcgaaaagcagcaagtgctcttaactgctcagccaccaccccagttgaactgatctttttaaacacatgggttcctttttcattgagaataactggacaagctaattttccatttgcatgagggtctgtggctagttcagtattttcttgaaaatatcaggaggctgtttgccttgctgggcttttgcccccccccccccacacacccccgccggtggtctggtatttttatggagaaagtttggtgactctagaaggcaaggacagagaagtaagtactgacattgagctagcaaaagtaggcaaagctggactagaatcaagaaagggcaaatttctgagcccagcctttctgctttttaactgggggatctctcaaaggaaacaataattttcagacatgttaatactaccatgggaaaggcagtggatggattagtcctcacttggaacaaagaatgggcttgtttatagtaaagaccctttcaaactattttctgcccttgtgtgggtccaaggtccaaaagaaagctgtccagctgagccatctcctagggggtaaatgggaggtggtgtgtgtaaacaggggaaagggagaggctttaaaatgctgtaggtaagaactatagtgcatatctgactcaggtagagccagtccaaagctttctaacaaagccacatggatagtcacggcatctgttaacagaaagaatagggaatagctaacttccagcctctgataagctgggagcacagtttttgagtcaacaatcatctacagagtctgccccaggatttaggggctgtaccagaggctaacacatagctaaggaggtacagtgggcatcaaaatggttggattttgagacattccaagcccctgtgggaccagctgtggtggcacatgcctctaaccccagtacttgggaggcagaggcaagtgtatctctgtgagtgtgaggccagcctggtttacaaagaaagttccaggccagtgaaggctatcatagtgaggctctgtctcaaaaaccacaagaacaagaaaaacactaaaaaccaacctctgtagggtcaacagagctcaattcactttcctcatatatagccaaatgtaagaactctttttaatttcaccattaaaaggaacaggatcaattggggtgggattcttctaggaaatagtttacccaacaaatctccatcaagatggctaaggccatctaattagttttactcaggcatttttaatgcaaaggattcagattttaggcaaataattctgtaggttacctacaacaaaaatatatagccaaaataacatctaaatgggctgttttaaggaggaactggcatttatcaccatacagggaaaacctcactattagcatttactcagaatttgtatcagccttggacattgtttcggcttttttgcttttgtttgttgtaaagattaacagcataagcaacatttaaagtggtgaagaagtttaatgtactcaatacatcagactttctggatagcagccatatacatttaacacataacctcagaagatttctttgtggacttgaaaatgaacaaagaaaatgactgggggctcttcccagtcagctctggctcgacatttcagggctgtcccttagtgccacaagggcaggggttaacttgtagatttatatcctgcagtgatgcagccatgcctatctagggagaaagataccctgatattagtgtattgtcctactgaacattaaccaacttattatctaaccgaactatcttatccaaacagccttttgtaaattccctatagcacatatctgcaattgcatgttttgcaggttcagttacgaagagccaaaatgctctgaaaatatcaaatggaaaattatggaaataaatcactcataagtctgaagcaacttcttcacagtatgttacctagtgtgaatcacaggtgtgtctggacaggaaatcagatagtgcaatcaggggttggaaccgtatgtggtttcaggtacccatgaggtaccttggaacgtgggaagaaatgactgccacaggtgtgccatttaaattctcttcaggttcacggaactcattactagttccttcattaaataattcatcaagtaacatcatttgacatgtgttcattttatgttttcctgacagtacatccttgcctttttcagtgtcatgcctcacaagactgagcgatgtccaccccccaatcaaaatagcttggaaactatgagttaagtgatagttcttaaaaactaaaccaagcatttgtttatctttattattttatgtgtatggatgttttatttggatgtgtgtctctgcactatgcatatgcagtgcctgcagaagccagaagtgagtttgggatcccttaaacctggagttatagacaggtgtgagccatcatgtgggattagaaccttggtcctctagaacagccagtgcttataacaactggaccctctctctaaacttagagtgttattttatatcttggaaggctgtgaaaccaattctacaaaaatctttccaagttttatttcctaatatgaactggtgtggttctgttgcctcactatatctaggggtcattcagatgcaacactctgtgtgacagtgcctggtgatgtttactggtgacatctagaatttcagatatattaaagaataaattaaacagtgacaaatgctttccttaagataaccaagattgtgggggaggggtattataataaaagcatcagtgactatattggcagtggagaaagggaagtttcaaggtgcagcattattatgggtgggggggggtggtggcaagaagaaaagcagccgtgcagtttctcccaatcattcctgaaacgcaagccaacatcaccccagccgcaaaaccaaaaccagggcttacttagctgtttctgatgcctccctcagttcttcatccagtctgcatgagcaaaaattatcgttggaaaaaagaaacaaacaaacaaacaaaaaagcaagcagagcatgagcgtctcccgcaaagcagagccaatcgtaagtggtgtgtattcactttctccccccaaaactgtctccgggtgcaccgagacacactcagctaagcatggcgccattccttcctgttgggcggtcctgtctgtttactttgcaaatcccttcacaaagatgatatagatgttgccagggagtgaggaacatgctggctgaataaagctcagaccatccatatcagagtggatgttaaagttagctcacagcctgggacaagtcaggggtgtatctggtttagtaggtttcggtagcagatcgggttgacctcaacagctttacacacaggacaaacacttgaggggaattcaaaggactggtacaacagacttcctcaggcagcatgttgaggtcacccacaaatacaacactggagtacacacacagggggtccagcgtgaatacagatcttgagattttttttacctcacacttctcttaaaagatttttcttcatcgtaccttacaagataagaaatggatgccatgaggacagtgagaaacaggaggaaaatgacaggcaattgctttaaaccagtggttctcaaccttcctaatgctgcaaccctttaatacaggtcctcatgttgtggtgactccaaccacaaaattattttgttgctgcttcatagctgcaattttgctactgttacgaattgacatgcaaccctcaatagggtggggacgcacaggttgagaaccactgcttaaaacagtaagaactcgagagaaaaatgcttacccagacaacatgactgactttggagagaaaacttaattgtattaggcacaattaacaatttacaattcataaatatacagtcaatcctcgctgtttgtagactccatatctgaaaatttgcctgtttactaggacatctgaaatttctagaatcaatgtgcagtgcttttgttcacttgtggacatgacaaggtgacaaaaattcaagttgtcccctgtgcacacaatcggcagaagttgagcagaatgaggctgtgccttcctagctcatatagtttcttgggtaaatgttaacttcatttttggctggtgatcctgctattttaaaacagcagtcaagcatgttaccaaatatcacctgtttgtaggaacgagatagacagtgtacctcacagagaacgtgtgtgtgtgtgtgtgtgtgtgtgtgtgtgtgtgtgtgtgtgtgtgtgtgtccagaacattgttttaggtacaagttgtgtgtgctggggccttgggtgcaagatttggtttgttttgcttgtttgtctgagagagggccttgctgcgtagcccaggctggcctcagacgctggctccttgtatttcagtctttgagtgctgtgtgattacacacagttgccaccacaccaagctgagtgagcacaaggacagcgagtcaacagtatgtgctgactaagaagttttctcaaacagagatacacacgagccaaggttatatactggtgggggatgaaaaacaaaccaaggttatatactggtggggaatgaagacattgcaaccagaggcagacaggatcccaggcctgtatttcccccaggaataattgctcagtgtccactgagtgtctacaacgactttaactgagcagaactgtcccaggctaatgagaaccaactgtagttaatgaatataaactgcatttcagcccactgatgccaggctccacacagctgaactttggtcttgggattgcttgggatcaaatgctttggatgttattcagtgaaagaaaatagctatggctgtggcaatttggaaattgcacaatgtgaaaatgaaccaaagagggctagtaaaagaaatggcagaaaagatgccctgggatgtatcctaacgacaggaggaaacacagatggggtacagtggtggggggacccacaggactaggttcttcctccagaaaaacgaatctttctaactggaactcttcctcttgaagcaacttttccaaaatgcagcccttgagaatagaaggaaattgcctggccatgactagcttctcagcccccagccaagcacagtagttctccaaagcaatgcaatcataatcagtagcactgtagacctcaagctctgtgctcactgctctcattcaatcctcagccccatccacactctgagaattacttccccattttatggatgtgaacattaaacctctggggattttcataggctgcctgaaattcacatcaaattgccccaaaagcccatcctcttttcattgcactgtctctgccagtccatgggaggccttgctgtttttctggaaaacagccagtgctcactcccttaagaagacagaatgtccttgtcatcttttgcaaaagtatagcagtacaggaggtgattgacaaatgaagagaacaggagatagaagctagtcagaaagtcttaggagcaggctcctcaaaaaaaaaaaaaagaaaaaaaaagaaaaaaaaaaaaggagttttgatttttgtccttggacagaagccagaaatgtctgtagttctgtcttggctggaggctagaaatgcaggtatgtttggggcctatttttctggtctggtttcttattcttttttctttcacacagcaaagaatactattgtctggaagctatattcgaggctgtgacaaaaattgtcacatgaatatctggtgggtgggacaactaggatgaccagatctccccccctcatggtccatcccatgcctcaatctagaaaagccttcttaacccctactatggacatttgatggtgtccttccttagcacctgctcttaatatatgggcactttgctggcgtctcacctataagctctcatatgaacctataataagctccttcctaaaactcacctccccattgtctgggaaattcattccatgagtctgtgagacaaagtacccagaaaccactatcctggggtgattcttgctgcctgttcattttccaagaccctaggcaccatcccaccagctacagcttgcctgaggtttccattgcccccaagaacccccacttactacatatcaatattaatcttggctggaaaaataggatcaaaatgtattgcatgaaataaaattttttaaaagtcagtaactaatcatttacattgtgtaaaagaggatctgaaaaaatagtaatttaaaggccccagcgaaagctttatttattagataatgcttaatatttcctttaaaaatcagatgccatgtctcattgctctagaagtgagtgtttcctacccctcctccagtgcgtgtcatttctcagcaacgctccatgccctcagacttacctgacgatgctctctgggatgtggatgcaatccattgggatcagcccactgagttcagataaactactgacatacttaattttactgctgaattttgagctgcaagaggaaaaaggagaagagcctcatatcatcaattggtacacttccttcatgaagccattttctctccctgaaactttcttgtgattcttttctacattactggtaatagggctctcacacgctctaagcatacactctgccactgacctatacccacaccctgaaatctttttttattttatttatttatttatttatttatttatttatttatattttgtttttcattagttcaaattaggaacaagcttgcttcacatgtcaatcccttctccctgtccctcccctcctcccagcccccaacagcccccaaccccattccccctctgctccccagggagcgtagggccctcccccatatgtccaagccaagagagaatcccttcacgtggcatgggttctcaaagtcccttcttacaccagggaaaaatactgatccactaccagggaccccacagagtgccgaggcctcctcattgacatccatgtcccggggtctggatcaggcctgtcctggcctcccagacagcagtctggggtccatgtgctccctcttgttcaagccagctgtttctttgatcttcattcctccctttctgcaactgggttccagagttcagttcagtgtatagttgtcacaccctgaaatcttgctaggctcaagcttaacccagcatgcttgctgagcagaaaggatagcattgtctcagccactgttgtggaccaggcgctttagtaccatttttcaacatttttattttttttaaatagttcatatatgagcgctgcatctccatcacagctgtctctcccactccccaccccaaagtaaagatttcttctttactgttgttatatacaaagatatatatatatatatatatatatatatatatatatcctgtcaattagaaatagtagaaacagtaggaatctccatcactgctttttaattgacaagtaactatatacatatttcttgtatacacagcaggtgctctgagttaccaagtgctttgtggaatacctggtttgtgctaggtgacacatgccacttcacgtactcatttttttttttttgtgaaaacatttagaatcaaccttcttagaaatttgaaaatataaaagtttttattaatgctagacatcatgttgaataagggctttcttgaacttttaaattttctgttggaaatgtgtactctttgagcatcttacaacactggccccttgaatttaccagtctacttcctacttcagtaagttccatgctttcagattctacagacagctatccatgggggtttggttccaggaaccatcacccaccaccagatgcctggatccaatagtgccatgtcaagaccatgcaagtagttggttgattgcatgtttagggggaaaaataaacagtcaaaaaaaaaaaaccactggaaaaagtgtattttcagagatttttacatgtgtaatattttctaacagtggttgactgaacctgtacttgcagaccccacatatgcagaggatagagaacactcttttaaaaaaaatttttttatatatttgaattacaaacaagattgaattacatgacgatctcagttcccttctccctcccttcctcccctaccaccccacccaactaaaatcctacctgtcaaatgtcctttcttctaatctacacttgactcaaaatttctgcttcctcatgacctctgcatccttccttttcttcccttctcactctcgtagcttcttctcccctcttcccatgttctcaatttgctcaggggatggtgaccctttccccttctccaggggacaaagtttgtctcttttagggtcttccttgtttactagttgacagagaatactcttaagcatggtcccttcacaaaatgagaaatgtacagtgcctgaaacatatctgaatagcatataggatccttatttcaagtggaaatcaatattgtggcaggagattggctgtatttttcagccatgcttatgtttctgggaaagtcaacctttttccacaaatgcaatcctatcatgagccaatgtccagtcttctctcaggtccccccaagacatgatttatgacacagagttgcacatgaacaaagtacctcccagggaaacagaagcgtctctctccagcaggggctctggcccaccccacacatttggatcttttgggatgtgagttttgaataatcctatttactttttcttgttttttgtttgtattttattaaatttttccatacaatgtattttcatcataccttctcttccctcaactcctcccagatcctcctcatctctctacccaatctacccatccaacgtcatgttctcattctttctctctctccctttttcaaaaggaaaaaaaaaaacacactggttttggttttcattgccttttgtttactctgagaatcaagcacctgctgctgcttttgtgtttcttacatggtccccaaacaagtaacccagcttgccaattaactgcagaatgtgcatggtccaagttgtgtaatttgtctgggtctggtttgtcctggggattgcaacataagagactcagcgagcatctatctttgtgggcttggctccagcaggtggtttggagcagttccttctaagatggtctgaatgaggagggatctccagtgacccctggaccctgagtgcagttcatcatttaggaaatccctatgtctgcctgcattcatgcctccctgattttcctccattatttttaagtctgtcctcaccttcattctgacaggtcacaaatagtgcttcaatgccagctatatagaaaaccttgcataagaaggatttgttttgttcctattcaaagagtcctttaggcacactgacatcaaattctaggaatttattttcttaacagaaatgtcttgtgggaaatggcacaacgagacagccaacatgggaactacattcttcaatgcagagttgctctctgcccacttaaaatgggataggctcaggtcattcttgcctggacagtgacctttctacttggtcctaaatcctgtccatctctttctaggttttatcctttacatggagtgtgcggtttgaatgacaaatgtcccttatagtcttgggcatttgaccacttggtccccagttagtagcattggggcgggggagttagagtggtggagacttgcaggaggaagcatggtattgggggcaggcttggagattcagagcctctagttagctctttctgtttcttgtttgtggttcgaagtgtgcactctcagcttcctgtcctgtcactgcctgctgcttgctgccatgcctctgtgccgccatcatggtctctcatccctctagaaatgccagtccaaaacaaattctcttttccttaagtcatctttggtcatggttttctatcataacaacagaaaaataactaatgcatggggttacattaaaaaacaatggtgtgtgtgtgtgtgtttgtgtgtgtgtgtgtgtgtgtgtgtgtgtgtgtacacacgcgcgtgcgtggctggttcactgtcttgctctctgtctgtctgtgtctgagagtgcatagtgcatgtgcatgcatctgtaaaggggtgaagctgacatcagtgtcttcatcctatattttgagactttagctgagtagatggagcagggaccttagggagagctctcattatttctgcaaaagaattcaggggtagccgaacatacagatcacaccgtgtgaaggagggagagagtcagtgcccctccccttccccatgatactcctgtctctttctcctagcactggagtcacagccagcaggtgccatagcctgctttttacttgggttctggggaccgaagatcaggtccccacatgcttcttcccatggagattgcctctgcagctgtgtccagaggcgggaacacctgaaggtcctggaatcgagtcatggtaagagtagggcattcctctctccctccttcacacggtatgatctgtatgttcggctacccctgagttcttttgcagaaataataagagctctccctaaggcccctgctccatcttctcagctaaagtgaaagtatgggctacaaaataaataaataaataaataaataaataaataaataacatgcgttttatgaggttctctcttgctccatggtctagagatctaagtactgaatactcctggagctaccctggcaagttaccatcagcctctttgggaatgcaggcgacaccaaggaacaggtgtcaggtggagaaagtgatcagccctgaccattggtttgagtacaggtccctcagaaagtggatgtactttgatttctgttcccttgaaacagttgagtttctgccacatacaaccaaagaacagggtcctgtttatgtagatgtcctactccaggccactagctcataacattaaaacaaaacaaaacaggcagttataaatccctcacactttagtcaatgcagaaccctactgctcaattgtttgaagtcaggaatgagaatgctaatacatttcataatttaatattttaaaagcactccctctaaaaaatctgctttacatatatacatacaatgcacgcacacagaccgacacacatatttattttctctagactattgtagttttcatgagaagtttaataactttaagccaggaaaatgtatttttctaccttgatggataagttttgtgagattttattctatttttaaaggtttctagaaaataaaccctgttccactcacttaacttcatatccctaaacataatggcatatagcacctaagtgtcgagtagtcactaatacaaacaaggaatctctacctttgaccccagtgcaactcccccaaactactcctcagaattttcacttagttttgctggctgcacagttcttgcccagaagaaatgacacacgtaggcctgtactttagcctgccctagcctttattgtctcatttatctctctccatacaagtactagccaatcctcctcctatgtggcatgggactctcaccacttcatattccatacttacagaaagcaatttagaggccaggttttgcaatggttgtgggaaatatttatctgaagtaattatcacttttttttttaaaggaaaaaaaggagtttgttatggaacccaatggcctgcacctcatcatcctcctgccttagcctcctgagcactgagcttgcatctggcctttaaatgagaactctggatgcatagtctgaagtatctttccaggaagttaggagtaaattacattttcctggattctcttagcttacaggaaaattcacatgccctgaaaatgctatcatagagtcatcttgtgaccatcacagttataccttataaaaggccgtgtcaccgcaaggatcgttctgatgaaccaagatgggtggacaatgatgaatgacttcaaattcttgcgcaacctattttgcaaacggaaacagttctatattattttaaatttgctttccattggaaacagaaaatagatccccaaataagaatacattatgttttcaggagggattctagaaaagttacaaggttgatgtatagaatgtttagtattaattttaaaatgcctctgttttctctctctctccttcccctaccgtgtgtgtgtgtgtgtgtgtgtgtgtgtgtgtgtgtgtgtgtgtgtgtgtaagtgtgtatgcactcctgtagagaacacccacaggagaagaaccactgccctaatctgccctaatacataaaacagtagccaggtcacatgacatcaccgaagactcatgggtaccttggtttgtccatctgcgttgtaccaacacaactgcagtctagagtgaaccagagctgccaggttcaggattgcagtttataaaatctagggaggatttgctttgcttagttttaggcaccatgtggtactttttcactaatagttttacaacctactgcttcatgtataagtaccctgctatttctatgatatgactgtattatataggctagaagaatattagatatgagagttagtgagcagtcacaatagtgactgaatggtgacaccagcataccgtctgtcaatcatctggtagcatttcttcatccagcctagacctggcatcttccgtctgggggttgcaccattcaagtacacaatcatgtagtcctcagctaccatcagctctaaggtacttattacatatctgatcacaggaaggaagagagagagtttcagttcccacatgaaagctttcattctatttataccaaaattaagtgacatgcaaattatagggtgaatgacattgaagaatagtggtgcatgttatctcgtttttcttgagaacaatgcgtcagcattgccctttatttgtatatgtgcagccaccttagaaaaatatgtgggtttaaaaggtgacataagaaatgtctgtaatattatcaaatattaagggcaactcagattaaaggtcaaaggtcagtaaggacatttttccatcactaagaacatgttatcagaaacaaaaacaatcctttgcctaaaggaaatgttagaaaaggcttagctataagccaaatacagctcattttcttttgccattattctacagagttccctagaacaaggctccttgacagaaatactactggcttcttatcagaggtttaggatcggctatgtcatatacccgtgcagttagttaaagaccctttatcagccaccacatgcccacagatgtcaacccaatcaccactcacaggaaaaggttttccatgacatagtggtaatctgcccggctgctgtctggcagaaaacaggcggcaaacacaatgatggcattcagaccgtccccatagtatcctggggacaaataaaaagtgtaactgaatgaaatcccttaacaaggtcatattactcctagaaagagaaatttgatgtcttgtcctgtctctctgtgtgtgtataaatgagatatatcatgaaatgagtaaccatactgaggaattatatatattcacacacacacacacatatttaccttttagtggttaacatatttatatagtcttgtatatataatataaggcaacactttgacacataagtctctaactcaaactatactgatttacaataaaagctaatctatacaaagtttcattctggtggctgagaaagagattctattagatccacaatggttcttttagtttaagatctcattaactgtgacaatttagtcagtgaatcgcaattccatccaataaccaggggagagacatgcaaaatacctttaattttgatttccaggcctagtcatttgactgtagtgatcctggattctctggatataacaggaagtgcaggaacacatggtaatgctggccaagcccagaataacagcacagaattcacaacctcacatctcttagagaaagcagtgcactaaaaaaaagggggccgacctaaattctcttgaaccttatgaagatacgtgcatttgggaaaacctgagaatcatttctggatgagacaggtgggaggtagaagtgctatttgcaggtggagctgagaaaaacaggatctgtgaaatgcaagtcaaggcaccattcaaactctgaaagtcagggaatataaagatacatctcgggatgtcacccccatatttttaaataactgaaatcattttagcattgccccatcttttccccccacaaacattctggttcctgagatcatctctgaaattgatagccggtgctactcaactaccaaaggataagtgtgtggagtaaaatatgtctctgatacttaaagaggaagatggtgccccgattgccattgggggagagctggggattgaactcaggaccctcacatgtgctaaatcacactctagcactgggggaaccatcatccttgatcagttttaaatatgtccatttgagcctagagtcttaagcacgctaccaaccactgcaccactgagctgcctctccagtccttaatcatttttaggcaagggcttgctaaactgccaaactcaccttgaactcactttgaaacttaggtgggcccttaaacttacaatcctcatgtctcagtttccagagtagctggagatcttacttacatttgtttttcatatatgtatatataagtttttcttatttatatatgaattttcatatttatttatttagtgtttgaatatgtgaagcatgtacacacatgttccctgggtcacctatggaggtcagaggacaacttgtgggagtcagctctctccttcgaccataggggttctaggcatgggacacatgtcaccaggcagctgagacatcccaccagcccattaaatgtccccagtctacatgcttgtagtttacattatattgtcccaaatttacagttattatgtagagaggcccttggagctttgagcagagcaggacaagagtgctcctaaccctgatcctgttctcctagaactcgatgttttcctttcagagctatgacaatggctctggcagtgacacagcagggaaatgttggcagtagatttggatggctccctcttgaggagcacttcaataagatgtcccctccaaagacaccaattatgactcttaccaacaaagcagagagaaaggaactacaaatacatccagttgtgggctcgtgcgactcatttgggatgtcggagaggtgtttatgccacctatcttacggatgctaacattacatctggtacagtataattgtgagccaacatgccctcacctccctctggacttcctgctttggtcccatcatccccactatgtagccatttaccagcttctttttagaatgttaacatgaaggaaatctcaagacagacattttatgtgagaagttcttggttctgaggactcacgagcaaatggaaatccgcaagggatatagaagcgagccaacgtgaagacatgcaattcagacagcaaaggacaacgtaagtgtccaacacaagagagtcaatgccacagtcctggtggaaaaagcagcatgaacacatctttctaaatgtagttgttggctatggtgtcagaaccattgagaccaggactattcagttccgtgctctgcttctggagaagcggaattcctaagaaatgttagcgtgttcagaatgcagcggcactgatacaatctttgcatcatctaaccgaggtgtacgtagggatcactgcctaagtgaggcgtttagctttgttcaaaagacgctgacatttacaaatgaaagtggatcccagcactttgggtagaggagcggcaagaagagatggggcgaaatgaaagggaagaaaataagaggacaggcggtaatgcaagaaaggcacgagaagaaaaggattgccacatggaagtgtgtcccccagtttgtcaactgatctctctatagtgaggcattggatattctttgaaaagtagctcactggtaagtgagcagataggtcctatctcaaaaacaaaacaacaaaatttactgggcaagagcagtaactagagtgagaaactgctatttagtcctctgtacagatgctttttggggaccagataacctctcaatttctaccccaaatcatgccacttttcaggtaaagttggtaacagcataattcctatgaaatttggtttgtctgtctgtctgcactggggattgcaactaagtcccagtgcaggctatggtggtactctgcccttgagccataggactgtagataattttacttttcgctttgagtcagggtattaataagttgctcaggttgtcctgaaatttctctatagcctaagaaagtcctaaatttagaaacctctgtctcagactcccatgtagctggaattacaagcctggcttggagtttggttgtttaaatatttaatttgtcagactctgttctgttctcattgaacaagaggtagacataggtgcatgttcggagtgtgtgggggaggtggtatcagcaatcccaccgtggagcttcctgaggccctatggatcagtgatggcataccttacctgaggtgacacaagaggcatgaaagagatgtgacacaagtttgctggccagcaaatggaatggagagagaaggacagatgtcacaggagcaacagaacacgcgcacacacacacacaccagccagcaactcttctgctcattctttccaggctcttttgtccagcaacactgcagagaaggttacctgagtctcctagagtgaaataagagaagtaaaaagaaaacaagacaggaaactccttgttagcatccttcagtatgattgctctttgttattcagcgagcttattctcagcacgaagttaaaaaaaaaaaaaatcagttctggcttataccagaccccatgatattgtctatgtaaaatcacccatcatgcttttagccttttttttttaaaaaaaaaaaaaaagaatatcacttatgggtcataggatttgaacactgacatcgtcacacactgcctctttcagctgatatagtaattgaggccagagaaggttaggggatgtaccaaggtcagagatccttctaaactgtgtagagggtgcccatgccaaggccaccaaatctgaggagtggattacaaacacagcagtgaccactggagagcatctgactgtgtgccaatttgttcaagcctttggttgcttccacctttcagtttcatgcactgaacattgccctaccagaagtttctctggggctgacaggaaacctcttcagagcaatatggagcacagaagcaagactcgtgttcagtctgttttgatatgcttcccagaagccaatagttggcagcaaagacgcttggtcatcagagactgggagagcaatgtgagtttccaacacggaagactaagctttgtcaaattcagaagtaacatctgagcaaatttttacctagagcacaaagctgtccagcatgtaggaggtggcggcttctcagtagtgggcggagggtacagccagaggcatattcatgcagctgcgtggctgaaggagactgaggcagagccggggaaaggagaggtggccttctcttcaaaaacaaactgacagtcactcagacaaaaaccaaatgcacgccacataatgtgtggagaggagcaagtgccaaggggaggaggtggcagggacggagctcagcaaaccaggttcccctgaggtcacacatggactttaaagagaccatggcaggcagagacagtcctgcccaccagtgtactcctagtggccgcttggcctgattccagtgacttggacatcaggccacccaacccatttgatttgactgaacttgaaaaaacaaagaggctaatctactaaggtatcaagaggtagtttggcctttatgctgacagtagaactgtgggcctgttgtctcatgacatgggactctgaggtcatcatcaccatgtgactttgatttaccctggcagacttttctatatttcctgtgcattttagagaatgcacaggtcacttttaaagtcaatctttgtgactatatttgtttattttttactaccccaaagcaaacaaaccaaaaataccagaggggcaccgtgaagcaagaatgatttatatgaacattggaggagggcttgggttctccttgtcatcccagcaaggggctgactttatactcctctcgcaatctccacaagctttgctcagcttccttccaaagggctaaggaagagattcctcccacagggtcctactgctgcccatagcagctatcccaggttcatggattgcacagcaaggcaagaaatacgaaggtcaggtcaagggaccccaaggttatcctttttccctgtcaatcagtttccttgggtggccctggtattcatgggaggtagtggcacatagaaagagtggggagagatctattgggggagggatggttgactaagacatttgtgtgcatattagaaagcaaatgctattgattaaatgcagtattgaaaagggctgaagctacagctcagtggcagagcctttgcttagcgtacgcaagcccctggcttcaacccccggcactgagaaacaaactcttaatgaactgccaaaacttatttcctagttctcattaaggcagaggcactgacagcaacgactgccttgcgagcttgtgccttggtagaaagatgcctcaagactgcaggaaagggatgcatgcagcagacacatcaaacagccaatgatgttttctgaagtcaacaacatccaatgcaatgcctttgttcatctgactattttctgaggctccaatttaatcaaaactacacgcatgcctggaaccatcaggtaaacacacttttccctctcctgggtcccttgctggaacagaggttttgactgtggttaacttttgtctgtcccaaatttaaagtggctcaaaggagaataaatctttggtagaataaataactactgggctgagtctaaaaagatgcatgtgctggagcctcagaaggggattgaaagcccctccaccattgaggtcttacctccgtgagaaatgactctcctgtagggttcgatgaccttcatgtcaatccgttgttcctgttctccaatcaccactgtcctccataaccggttgtcttctcgttcctcttcggctgtatactctggaatagattctgactcttgaccagagctcttgttggccatgggatcttctggaagggaggcacagagtgggactgaagcagcaagacttccacaggacaaacaggatagagactggattggaagccacctccttgcagagccacccactaggaactccttagaggcgaatagcagcctgaccatacaacacctaccatatagacagatggaggaaccaaatcctttcctaaggtcatgctgaagtagaaacagtcgaggttagggttctggtacctactcatctttggtcatcaaggttaaacactatagatctttctggtagggtaatatcaggtccagttacctttagcttcctggggccatctcccctggttgcttggagtgtttgagtgcctttactcgatgacactactgcttagaccttggctgtaagactcttagaacaaggatgaagccctttgaaccattgtgaagctagggtgtatgcttgtacagaaggctgctaatacttcccgtgcattgttccagaatatgctacagtaaagattatatagtgaatgggaaacagataactttgtaaactggaagtttcctggcagattttaaacttttgggtccacaaagcaacagcaacaaaaaccccactgagtattctttgctcaaggtttagtcttatgcattcaaaataataatcatggtgttcactgagaggctaagctgcaactgttaaacatttttactagacgtgcgaatcaagtttaacaaaaggcattcttcacagttttaaatactccgaagggaaagattatttattacctttcctacaactctgaggcatggctgttcttattttttttacattgtggaagaagaccatttagatggcattgctctttgcctcaatccctcctgtgtcacaatagcagtgatagcaatagcagtgctgtggttcccatccattggcactgacatagcagtaggtgttaaaatggacattataccaatgtggagatgggtaactagcaactgtggtgatatcttccttaaactcagtcagtagagcatgagactcttaatctcagggtagtgggttcatgccccacgttggacaccaaaatataaatggagtttttaattggtccagataataaaaacctggagtcagatatagagggttatgctgaagatcagagagaaggagcaagccactgccacaccttacctcccaaacatctcagcagacaagagagcgagttcctgtttctccctgcttataacctgattccactcagctatctcacatccgagaccttcagacctctatggttagctagtggcaagctccattctgtgacctccagacaggctttatttgtacaagcaagatatcaccacaagtaacaaatactgctcctgctcctctgctgtgaactttcctaggctactggcatgccttgagtgtgaattccttgggttagggaattttgtctgaatcacctttaatacttactcacttctactgacacatctcacagctctcgcagaaacctactcagaatatacaaattctgggaaggtgagtgggtaaatgccagggagtttgagcaagctcttaggactagagatagtctataaggacccataacacagcattgcatcctggaagattcagcagtcactaaacacccacaagtacctaattactcaggactcactatcggaaactgaagctcagctgggaagccagcctagccttctttgccaacatttacagccacaccacccacagagccctggctcattctgattccactatggtcccagcagcactcaacagcttgataaggatggaaggaagcaaccatggcttctgatcaagcaccatgtcacctggtgtagacctatttatttgtctggtattctttcccacttcttcctttctacttggattgggaaacttatatactaattctagctctcttaggttccatatttctcatcctgtcgttggtacctaactctgggctcagacatgatatgccttttgatgttcatatgtccttgacatcagtgaactaaccactcaccaaaccctccatggacttatcatgcatctaaacttcagtgaactcatcaaaccttctacagtatatttggtactctagcctgctctagtttgtcctctgtgagttgatagtgtgacatatatgatgaatatagactcaaatctgcatctgctcacaaattagctaaaattgtatcatacacctcatgtaaaatgcccaaaccatagacaacataagagaaaatctaactgaccttggcatagagatggtatttatgtatgtatttgtttgtttgttttattagggcttgtcatgctatctgtgctatagaactcatgagcacaagcatgcttcctacctcagcctcccaagtagctgggcctgaaggtatgtgtcaccaggcctgggtctgcaactgatgactttttagatactaacactaaattcatggagtaagtaattgacaaactagactgtgttaaagttgaaaacatgctccatgaaacacagcaccaagagaataagaagatagctacagactaggagaatgtatttatagagtccaaatctggtaaatgattattattcaaaatatacaaaaatgcctaagacttaacaataagaaaatgaactatttgattagcaaataagcaatacaatggtgttagggctgtacttcagtattagagtgttttcctactatgtacaagaccttgtttttagtgcttaataacacaatgtacacacatgggtgtgtgcacacacacacacacacaaagaactgagcagacatcacctcattagtggagataaatataccaaggaagcataagaaaagatgtatgacatcatttatcattttaagatgatacaatagtgaactgctgttacagatactactattagaaaggtcaaagtccaaaacatggacagtcaccaaactactgagaatggggcacatcggggattctcatgtgttgatggtgaagatggaaatgttccagtaactttggaagacagtttggaagtttcttataaataagctcctatcatgcagtccaactcctttgtaattagccaacagaagggtatttccagacaaaaatcttcacatgtatgcttacagaagcttcattcatacttgccaaaactgtgaagcaaccaagatgtctgtcaataagtgactggaaaaacaaagcgtcacatccatacactggaataccattaagtgctaaaaagaaatgaatcctcgagatgtgaagggatcataaatgcctaaatgcagaagaccaatcgaaagtctgcttactgtgtgatcctaactatctgacattctgtaaagggtaaagctatggagacaataagaggatcagtagcagccaggggctagagggttttgtgtagcaaatttctgcaacaggaaaccctcagtctgaggaaagctaattcagacacaatgttctgagggaagcagagcattccagccagcaagaagctccttaacttaggaggtaaagaatccaaagacttcaggaagtccctgaaactgactagatatacaagacccttccctctctgagcacatagatgctgtaagcatcgctgaaagacagaaaagctaggctgcctagaagacactcagacaagatgagcagcctgaaagaggcagagaccaacccagctgcctagcagctcagaacaaggcagctacctgaaaagacaatactctgagcaatctgcaggctatgcagtgtgctaagtaggctttggtggtacaccacaagttgagtcatttctgctcctgtaagtaacttctcaactatattgctgttagtcactcagtaaaattcattcatttaacaatttggactttgatgacatccttattttgttctgtttttggttccctatatggggtgggtagatgtttgcttatgtctccccaggaataatgtcacacagcacaggtaaaggaagggtaaattacaggtcactttctgcttgtctaaacccacagaatgttcagcatcaggagtgagtgctaatgtaaactccgtattctgggtgagaatgatgtgttgaccatgaaggttgtcagttgctacagatgcaagagcagagggaagttgagagtgtaggggacggaggagggagtgaactagacatgtgacatgcaatttggatgttaagctaaaagctctctaaacatgtttattagttgaaaaagaagtaacacagaaaactataagccacaaagcaattcttgaaatagaggagacagaccatgtcacccatccctctcacacacacactttaaaaatgagcatgatgattcttctgacaattgagcctacccaataaatgagaatgatgattcttctgacaattgagcctacccaatatacaagtatctcctcatctcaggaattataagcctgcgaaatttagaactagccctcaagtacattactttgttaaagtctcttagcttattaactccatgaaggaatagttaattttattctattttgtttttcctttaaagaatttgctttgatatctttacataggagtattacataatttgaacccatatagctgaggggcaatgccacctctgggcaggtggtcctgaactttatgagaggacaccaaacaagtcaggaagaacaagtcagtaagcagcactctaccatggccttccctttatttctccaaacctttgggtttcttccttgagttcctgccttggtttcccacaatgaagaactgtgagctgtaagatgaaataaacccttttctctccaagttgcttttggccatggtctttatcaccgcaagagaaagcaaacaagatagtgtcttaaaaacatgtatgtgcaagctcacgcctttaatcccagcaatcgggaggcagaggcaggcggatctctgtgagttcgaggtcagcctggtctccagagtgagtgccaggataggctccaaagctacaaagagaaaccttgtctagaaaaaaacaaaacaaacaaacaaacaaaaaacatgtatgtgcaaacacacatatgcacacacacatgcatagacacacataccacacacacacaggcacattttcctactctttcttgttcaaaagtgtttttgaggcgttagtcctaatgcttcatactttgggagctactacactgctgtggttccatctacttcccttctcattggcataaactggaagaaataaaatggatcatttaagaaatggggagggctggggatgtggttcagaggcagagtgactgattcccaggggggatgggagggggagggaaatggaggagaagaagaagaagaagaagaagaagaagaagaggaggaggaggaggaggaggaggaggaggaggaggaggagggagagggagggaaaaagtcttcagagcactttaaggacttgtgggaagtcagtaacatgagccagtgggcagtaaagatgctctcttcagtcttttgagtgaacagtaccttcctcatcttaattctgttacaacttgaaagccctgtctttatttcccagctattgcagatgtgttcagggcttatttaactcttctcaagtcctcccaatcagtcatcagtgtcatcctctcctctttaactaagaagtttttcctcactgatgatctcttcccctagcaactgctgaagacatttacaccatcactcttgaggaaggagtcaacctgaacttttcctcctggctttctgagatgatttaacatgtatgctcttgattgttctgtgctacactgatcacaatagggtcagcgtgaccttcctataggagtacacaactgtgaaagctggctggctttctgcatcacgacactgcatggataacaggaatgctctcagaagacaagatgcctgacattttctggttttagcaaagacatccagaacatagcttaagaggttaaaatcaccttggtgataaacaacagataggaagtaaacctgggtgtaaaatctccgtgtaggggagaaaccgaaggttgggtagttaagagcatatactgtttttacagagaaggctcaggttcagtgttcaggacccttgtcactaggctcacaagcacctgcaaccccagctccagggaatccaactgtctcttttggacattggcacctctgcacacacatgtacatagtcacatgtacatacaccgagagagatggatgatttaaaagggggataaaataaatcttcaaacaactgcagcgtgcaagaatacaaagaaaaaaatctttagacatactagcttgacacatcatcacctgcatgccgagtgtggaaacaagcacttgatttcataaagctgactgcctgttggtgctagaaataaagaagatcaccagtagggatgttaaaatatgtggctgcctgactgagagaatgctggcatgcctatcatcagggtcagtgttggaaaagctgctaggtgggggccattaaaaatcccttggggacgctggcagtccaaaagcatagcacattgcctctatgtgcttatcagaagcacacaggtcaattctttaccatcttcccatgcccatgataaagagcctttatcatgtctaagctctgaattgtgagaaaaattatgtcatggttggttgggagaatagcatgaggttatcatttccttcttgacctttgagtattttgtttctatggttagtatcatgaagcaacaaaagcaaaatcaagattacccttcatatgaaagactaacccccaagccttcactatccgtgtaattctgattttgttggcacaaaaatcaagcctgaattatatttccgagctgtttggacacagctatcaatgagaactgattgaaagggaacaaattgcacctttagatagggaaattaaattgtttttccataagcaaattggcaatagtaggcaaattccctggacaagtatttggccatcaacttccacataaaagagggaattggtatgaaaatccttgaggtggtaaaggacgggttctcaagtcaacagtgtgacctatggaagcatacatgttgtgtaattgccccataagttcatagggagtagcaccattaggaggtgtggctttgttatggtgggtatagcctttgaggaagtgtgtcactatgggggcgggctttgaagtcccatatatgctcaagccatgctcagtgacccagatcacttcctcttgtaggtatctcaactccttttccagcaccatgtctgcctgcacgcaaccatgcctcaccatgatgataatggactaatcctctgaaactctaagctaccacactgaacattttccctttataagatttgctgtgagcatggtgtcctttcacagcaacagaaaagctaactaaaacacatgtgaatgtgatctttcacacttggtttcctgtatgcaggcttaatttagtctcctccctttttactcattagcctatcagacagggaagcagtaggaacaggaagtcaacacaaggtttggtttgaatgctatcacagatagtcacaactgtataacttcaggttattatgtaacctcccttggtctctgtgttctcatctacagtgggggaaacagtctgttttacagagtagatgtgaggattacaataattatccctaaaatacttggggcatatcctatacaatacgttaaacactataaaattgtccattcagtaaaataaattatgactaatttttgaaaaactatacttgaaagaatttgacagtcagtttgatagttcacctgtaatcttatcacttgaccttgtcttaaaaaaaaaaaggcaaaaccaaaaccaggagggattaataaacaaacactcccttttaggatgtatacactgccttcaacttgcttacctgaaaaatctcaagacacgaggcttttaagcactcatttcatatgctaggcctaaaatgtatttatatcccaattgtcctatgcagtggttatccgtgtctgctgaacagaatgtagctatcagctaaactctgttttggaaggttaatggtttggattgcttatttatttattttttataatagtgcttggatacacacctttcatttaaaatcaaagggaattttggatttcagtgtgtattaaaatccagctctccgagtaagacctagaataactgaggtctttaaactgcctctttctacatgacaatatcaactaaataaaaagaaccatgtcagcaagtggcagctttaattaccagcttgctcagctaccaccactttgctcgacagatttgctatttataaacaaaaggctcagatgtggtgtgacaaagctctccacagagacagcatagcaagggaagggagggaccaggcatagctgtcttcagtgtggtttaaagtcagtatattaacaagaaaagagctgggacagcagggacaactggaatagatggtggtggtgggtgggagggatgagaccaggtgtgatggagggagtagctggggacgactcttgaggtcaaatatccagattattacactcagcttccaacagcagtaagtttcaaccaactgcaggtaggaaatatttgagggaaattgcatctgtattggatgaacacagaagcttttcattatcccctaaaatacacgtttcaatcatattagatactacaattaatctagaaatggcttaaagtatatggaggaggtatatggattatattgcaaatgcatatacatataagggaattgaacatccttagatattgatgtctgtttggggtcttggaacctatccactacagaccacatgtatgaagaaccctacagaaacccaggagcaggacaaaaatgcagcataactccatataagcataagaagcttggagtagtcctgtacctgcttctatttattattattattattattattattattattattattattattgttatacctggttctattattattaataataataacttgaaggaacaaaagcttaaactctgtaggtctacaatggttatagatattgtccctgtggctcaatggcattgggctgaattaatcagccaatttgctaaatgtcccaaccatattctcctatgaatggggtttcctgtgtttaaaagattgagcatcccttaactgcagtgtttctttttaagactagggaaactttatatagctgaaagtctttcacttcgactttcaattataatttcagagaaacagaaatggcaatgctgcttgatgaagcaatggctctgtatttgtctgcacttaagaataagccaaatgtcaccaagcaagagaaaatatttgcagtagactagcactcctgtcgtggctgttggtcctgagtctgtctttccctccatccacgcactccatcccttcttccttttttctatattgaagatacatcatcaaataccacaaagtctctgctctgaggaagcatgaattctagtgaggaaaatccagtaagcacctcaatcagattagcaagcaaatcattaaaaactatagtttcaaacccagacagcaaaggcaccctagtatggagtgtgaggagctaggggtacacaagtggggaacacctgtgacagcacaagtcatggaaggcctattgaggaggtggcacctgtgaagagatgtaactggtcatgtaagggtgtgaaggagagagcattttagacaccaagagcttatacaaaggaattggtttctgatttcttctttcaaattttgcattccagattcaagtatgtttttttgtctacacagccttgattttcctataacaggccatagggtaggtaattcacaaatgggtaatagttgccaatgagtagtctctgggaactggagctactctatcatattctaaactgccaagcatggacacccctgagcgaggttctaacaaacttctagagtcacaggaagtagctacttgcacagacatgaaagatttgtttgtaatgttacatagacagtggttcacttaactttgacctcattatctcagcaacttaccatggccagtgtactcaaaggaatctgcttcatcaggggtatcgagttcatccacattgatgtcaatctcatctggactgtctaggttatcatcagagagaattgatccttcactttggtccagagaaaggttgatatttggggccgtgagcttgattctctgagggtgactgccattgagatccagggaattgggaggttctaaagaagaaaataatagcaaagttaggttacacacatggccttcttgagtggaactgggcctcaaggaaaaaaaatcctaataagggatttggatcctgcccccactttttcctgtatgtcccttctttcttggttttataagacaggttcttcttatgtagcccaggctggcctttagtttgcaacctcacctcccagtgctgtgatataggtgtgagtcatttggatgcttttattttatttttttaagtttatgtgtttgcatgtgtatgttacatgtgtgcaggtaccagaagatggcatcagacctccctggagctggagttacaggttataagccatcttccataggtactgggatttgaactctggttctctggataataggaagcactgaaactgctaaaccatatctctagccccctccttctggaccggcttctataaagcacccctcagtattggtttccattcagtacatcatccatatgataacaggactatttgggtagaaacttttgtttgtttgcttgttttgtttctctgtttaggtttcagaagtcaacatgctataatactaagttaaattttttatagagcttattgtgcacaaaaacatttaagcatatagtttcttggggttcttgtagatgttattcctatagaattgaagttaagaacattactgggcattggtggagtacacctttaatcccagcacttgggaagcagaggcaggcagagagctgtgagtttgaggccaggctagtctacaaagcaagttttaggatagccacgttagttacagagaaaccctgtctcacaaaacaaaaacaaacaaacaaagaacattatctgctaaattcatagaaaataccaaaacacctgtttatcttcagttgcctttactgtttttttcagggttttttttttgttttgttttgttttatgaatccttaggtactttagagtctttgaattcatgaaggaagtcaccacataagccaatatcatcctacattatataatgtaggatgcctataatgcctataatgttcatgatgacctatgctaagctgatggaggcagctcccaaccactctcagcagcttgtctctctgcccctgaaccttttattggctagaaacagagtcacacaagtcttttttgtacaagtttatctgaaccaaacagagagagatatctattgtaatctaagaagaaacacttgatttttatctctggtcacaatcattctggctcctaaattccttggaattttcctagcatcttttttttttttatctgtaatccctaatttggattatatggattatatttagggcctgaatttgctgggatcttttggtctgggcccttcgggagacagactgcatgggccctcgattccatcctcctcaccacacaaaaagaaacaaaacagtcacagaactcttgagtgaggtctgctgcctgatactttagtgagtgcattaaagtcctgggaggttgtcgggtccttttttcctccttgtcttcagaaaaaaaaaatcacaaaagccaaaacatctaaagaaggtgtcaaaacagagctgtgagggcactgtgggatgttcatgtgctatcaggctatccaagcaatgcactgggtgcaggaatgtgaactgttcaattgaaccaagtctgaaaatgcccctaacacccttgaatgcatgtagcctcaactgtcacaaaatggcagaggagtgtttcatgtgtacatagacctagccatctgtcaaacatgccccaatggtggataagctaaagtgatggtaactttccatgccaatcatcttccttttcatgtaactttagaatgtccattgtccgcagtttcttcctcccagctccccatcacccccccccgtatcatttgagcctctctcgggcactctgcactcttgttttccaaacatgtcactctcaaaatctcaaataaagttactttgcttttatagttcttgatttcggcttgatcggcattacatagtgtcagagatgggatcggaagtgcttcatactccccacccctgatgctgccagggtcatgacatgctcatgggtcctttgttttctataagatccctggtaactttagatcacatgaatccattcagcttccaaatcccctttctttttggttaaggttccaaacttttatttgggtgtgccttgctgtctgctgcttaggaagaaaatctctagactagatatctagaacaggcattcctcatgtggtagggatttggattctacaaaggaaaaactttttaaatatttattttatactgtataaatgctttttgcctgtatgtatgtgcaccatatttgtgcaataccctcggaggccagaagagggccttggatatcttggaacaggagtgacagatggttgtgagttgctgtgtgggtcctctggtagagcagccagtcctcataaccacggagccatctctacagatccaggaagctaactttcacattgagttacttactattgtgtttgaatgagacatgcctcaggtatctgggcacttgaggtagtactgtttggaggagattaccaaaacttagaaggtgtagccttgctggaagaaaaactttagaaggtgcagccttgctggaagaagtacatcactggaggtgatatttggggtctcatagccttgccctacttcttctttttctgcttcctgtgtgtggttgagatgtgatctatcagcttcctgttcctactgtcatgccttccccaccgttgtggacacagagtcctctggaatggcatgccaatgtaaactctttcttgagtttggttgtaatattttatcatagcaacatcagcaacaactaaaactaatccagaagttggcctcaggagtggtgtcttgccctaagggtagcctttttattgttccagtgctaagcaggaagtctctctttaatagtgctactctctttagcaaatctagcacatatcttgagtgtggcattaagcttccaagtgtttgtcctttctgccccacttgcttttttttttccactgtagatctgcataagaataatcaataacaaacaataccatcgactcaatgttatgttttttaatagcatttcttccaccaaagaaagtagcctatttctttttcatttaccctcatgcaaaagtcagattcttctcaaaagcagtgcgcaaatgacctcaagtccagttgctaataaacttgtttcccccttgaaacctcatgaaccatgcctccactctccccattagtcccagcactgctatcttccaggatcctcccaaaaatggccctttaagctctgcttccagcattcaatggctttttccaacttctgaagtgttccagaacctgacaccagaacatctagcaccattaggtgaaatcatctagaaagtattacctccagatcaacacacagaatctgtgctccagaggggaccagagttgcatctcaagctagaagcctaatttggaaatatgttaagagtctctcttacatggtactagttctgaaggcagaaagggttatgaatagtagttcatgcttggtactgtgtggcagggtcagagtccctaagaagaaaacagaagccactggtgaaggtacaacctcagttgcagtagatacccaggatattgaagacgccaggactgtgctatgtccaccaataacagtggcaggtatggaatggagcaggagactgtacgacaagctgtgtgagttacagatggtagagctaggaaattgagactacccaagtccttagaagccaagaagatcatgagaaattctagatgttgaacactgacttttttatcctgttagattttggttttactttttaaagccaggtttaatgtgataatgttaaaacctttacatacgtgtctcagacaaaggttgaactacatgctatcactgaagaatctccagtgttgaggaacatacaattggatttgcttgagaacttgagctttcaatgacaacacatcagcctagctttggggaattgtatcacttgaagaagacatgactaacgaatgaattgcatttggacctaggaatgacattaacacagccttccaaggactaagtgctaactaaaggccacacagatgtacaaacattagcccagaagttttctaaacaaaaccccactctattgcccccaatacctaactggcacacatcctacaagttactcagtgttctcacatgcccattgatgattatcacagcagctctaagcaaatgttcttccaaaattctggccttaatctcctaacagacacagccaatgattgactgaattctactctcttcatgcaacttcaggaaaaatcaagcactgtagatggacaacattcccagactgagaaacagcctcatgaattaactgtcttagcttaatcactgtcccaaactcttgctaacaatatccaaagagcaggctgctaaatttatgggcctctaaaattcaggctaatcagatgataagcttccagatgaaaatatttatctcctaagtcaaccctttcccttctttcccagggcatttgtgatgaatagaccataaatgaaatgattgtcctaaacatattttatgcttgcacatgacactgtaattatcattaagagtgcatatcaagagcctaaggttgacttaacctgcctcagttatgacatgggtaggtacactttacatgagtcaaccacaacatactcattcatcacttctctataatgaccttaaaggtgtctggttagctcaggactgaggggaaacaagtaacctggcagttgctagtgtccactcaatcaagctcagcgggtgtgcagaagcaatcttttgcccttatttccactcaaatgactggaccttctttaaatgctgtagatattcttgatcctcctccagcattggtcctaattagttttccactcttaagggacagatggattgattcaggattacagcaatgcagcatttacttcctgattgtccctccttcgggcctggtaagtgtaactgacacatggaggcattgattgatttcatggaacaagccttaagtggtggacaacagtaaaaggtaaatagttggtaaatattgaaatatccttaatgaggaaaacagacttccaaaaatacttggcaattggtattatctcctcttttcaaggacacactactattaaacagattgctgtctatatacacctgaaaaatcatttactgcccactgttcctcatagtttttatgtccacctgacacagactataattttcaattgaaaaactgacttttaggcaaacctgtgggacatttttcttaatgattgatgtgggaaggcccagcctgttgtaggtggtatttccccacacccccatccccccatcccccatcccccaccaggataactggtcctagatgtgtaagaaagcaggctcagcaaactgtagaacctagacaataagctgtactcctccatggcctcttcttcagttcctgcctccaggttctgccttgagttcctgtcagacttcctttggtgatggattgtgacctgagagttgtaagctgaataaaccctttcctctcaaagtcattttggtcatgttgttgttgttttgagacagggtctctttatatagccctggacttcctggaattcattatgtagagcaggctggtctgtaactcacagagatctgtctgcttctggctctcaagcactgggattaaaggtatgtgccacaattcctagctgcccatggtgttttatcacaaaaatagaaaccttaattaagatagctacttagaaaaggctatccaaaattgatgcttagagtgacccagccctggagaactgttaaagggatgtttggatccagttacaagtggctaaaatctagttgtattgttactgatattattaatagagttttaatatttgtataactcattgcttagtcacttcttttcccagggtgataatccatgttggctacaataatcttaattgagaaacactgatgagaagtttcaagttactgcttctgccctgatccctgactgcaaccatgttacttagtgtgaccttcctatctacgtacagttatactctcctgtgtgggactattctagctgcaagggactaaatgaatataaaatcaacaaatagtgtgtgctttaattataggtatcctagtactggggtagcttttccccaccaattatcttccttttcttgtaacttttaaaatttctttccagcctcccccttaaaccatttacactatttggggcacatactctcagccatttgaaccttgggggaaactgcagaactgcaattcacaaggccacacttccagtttcagagtctgaactgatcaacacccatcctgtgttatcaatggaccagacatctgcagctcatttataacactttatattaacacagtagaaaaaagcaacatgtctccatgggatctgtaagctatcctagtgaattattaagcccaaggagggaggaggctgtgaaacccaatttatagccagttggtcagagcaaaggtctgacctaagacagcaattggtggctaagtgggatctgtcttgtgggactgagcccttaacctgtggggagtgggactgcccaggcagatgtgtcagcactgaaacaaaccataggatatccagagggcattagtccaaaaactctggcatatctgtcacaggagagtttgtgttctgcgtgccagtatagtagaagaaatgttttccagcctcatccaaaaccagaatcatgggcttcctagataaaagtattcagaaggtacctggtatgcccctcaactctgtccttgtcctaaggaatgttaccgttccctccttacaatattacagtattcaacatagaccgtcagccacactgtgtaccatggaatgaatgtcttaatatatcacttgaaaaatgtttcccttgaacatttgaaaaatagcaggttctatgtgacagacattctcagagaagttatgtccacaagaatttttgagctggttgctccacatatggctagtgagcacttaaaatgacactagtgttactgaaggatgaaatttaaaatttttaccttttaattaagttaaatagccacatgtagttagctgctcctaacattgtcttaacactttcattattatgctgtgactttgaaggaatggtggagacatacagtggttactggtggccacagaatgtgttggtatatggtttacttctagagctcttacctagtacatacaaggtcctggatttgaaatctggtaccaacccctttgaaaaggtcacatgactcaaaattggaagattattttatatactacaatagcaaacaaacaaaattgtgttctcccttcttaacttcatttaggctgagctactggtgccatccatggtcagggttttggtgcagaacaagagagaggccataccataaagtgagagccatgtaagttataattgaaaatttatattcctttttttgtttataattcctttttgtcttgagtttaaacccttataaagtaaggtaattttttgtttttgttttttttatgtgatcctcggtttcaaagtgggccctgtgtatgccaaataaacagtctactacttggctacaccttcagctccccattggctttttatagtcaggacacaaagcattcttgatatcctattttccatattaatcattcatacaatggtgttcagttattgaacatagtcacaatctagaatttggcattgtaatatacaatagccaactataggcactgagaacactggcaggtaagggcaggcccaggagttacttgatgtggctcataactgtgagtttgaacacttgagtcagctctgagcctgacacctttctctcacacattttttccccatctttacttctattactgaaatcacaagttggatgcaggagaagctgccctctcgctgaatattgatgtctacacatagactgccatgaggaaatgagcagctgtttctctcaccaggcctcatgtctgcagcactgggactcagcactccctcctcgaaggggacatccattcccacatcctctgacgacgggaacctgaaaggaagcaaaagaacaagcattaaagaaccacacagggctttactgtccttaaaatcgatgaacagagaagggaggatagatgttctagctgacttgatgtaagaaaacgtgtgcagagcctgttgttaagtggccccaaatgcagtttctgtgaatgagaaccacaaaagctggtttcatccacaccatgaatagcagtttgactgtgtacaacagtcacttcttcgtgctcccacaagcaaaaaacaaatccagtaagacttcaggaagagaaaaatgcaaaaagccaattgatggcaagggacattgaacataaatgttttttgacatgagaggcaacagacaagctttacaggagacatatctgagtgtccacccctcccctctataaatgtgggcctagtatctcagctgtacaggccaaggataaggtactccactggccccactttataggcttatagattagggctatgcagcctactgtactcagttgtttcaggacaagcaatgagagtaaaacaactaactccatgagcagacatggaccgacactttcctacccacctttgaatatttaaagatttcccgtggctatgtgttggtaaagatgattatcctcattaactatctcttgtctctgctcagagctgagcccagtcccatttatatcaccctcctgggtaaaacaaaggctgaggaaacaggaaagtagaggaaaccttgacaaatttgcatgtccttctaggaagctggtgactgtagactgaattcttcttgtttttattctctggcccttgtccaataaatgctcacatatcatggtcctatacatttcttcctgttgatggccatgaaattttaatcctttatggtaaatcttcagatgtaagcaggaatctaagtttaaataggctaacattatattcaaggtctaaatttatttccttcctctatccctctcttaaagagccatttctccatgccagcctgggtcttccaaacatttggagtttgaacaacttccataggagtcaggttaagtccactgttgtcaacaaagcactgaggtgacaaaataagtcctatgcctctggtgataactgtactggctttgtttatttgacaaatatgtattgacaacctactgtgtgctgagaatatagtggacaagaacacttaacctctttcccgtggagaaggagatggagctgcaatgtacagtgctccacccagctctgtagctacgtccctggagagaagtacccatgtcttcaccactatttccacagacgcttctaaaacacagcagcaggaattgttaacattctctaaggtccaaggctaaaggcttggtccctagcctgtggcactcctggaagatatagaatctttaggggacaggcctactagaaggaaggtatatcattgggaatgcactcttgaagggacgactgggatactgcctcaagtctctctgcttcccagctgccatggctgtgctctgtaacttcctgctgccatgatattcttcttcaccacaggctccaaagcagcatggccaagcaatcatagactgaaacttctgatataatcagtcaaatagaattccttcctcttttcaagtagatcactcaactgttctgtcagcaacgggaagctgactaacatagggcgtgtctctgtacagcatctgtggctttgactctgtgtgttcttgaaaactgatcctgcaccagagctgagagacagtgaacaaagctggaggtgtagtttagtagtgcagctcctgtcaggtatgtgcaagaccctgaattcaatctctagttacacacgcacgcaagctctcccttgttccgctcagacggggtttctcactgaacctggagctcatgtttttccgcaagtctggtaattagaaagcctcacaatcctcctgtatacccccagaagtgtgagagtaacaggtgtgtgggatagcgaagctttttgcatgggtgccggaatccaaactctagtccttctgcttaacctccaagccctctctctggccctgaggctctggttttggaaatgctgagactcaaagggatagattcctgatttatcaagatggcacagtttgttatatataaaatacacacacacacacacacacacacacacacacacacacacacacacacacaccgaccttgttggctcaagttgtctgtgtggttctccttaacattaagtctctatacctgtcatacagaaaaatgctgctaagagcagttagcctcaacacttagatcaagctgggtgtggtggcacatgactgttatctcagtacttgggaggtagagtcaagaggtccaatgccagcttcagctacataaggtggctggggccaggatgtgaacacaaaacccagtctcaataacaaaagaacaaaacaaaaacaaaaagacttaaaaacaaagcaaactaaaataatgacttactgtgtgctgcaaagcatgttatgtcagtatttgtttccgtttcctcaccaatagcaggagaacatggcagttcttcaatagagtgatgacagaaaaaactgcatctatcatcactatagcgaaatttgctatgcaggctaagtgctttctctatgtgaagcttcaatcaaatctatcctgttcactactgtatctccagtacccgggcaagtaaataccctataaatgcgtgctagacagaagcaccctaaacacacacacacacagtttctctatccttctgtccaagagtcaaccttcaatgaataaataaagcttcacattcctagtgatcatctcactgagcccaaggaagatgcaaaaacactcacttgacagcacacataaaagtgcaggcttcagccttaagataggtatgggggttttaaatgtgacgaaaagtaccaacctacattttgtgggttttatgaattctgtgagtcaccggcaattcagtgaggcaactgcagaagttttggctatgaggtcagggttctgagttgtggtcccttaaccacttgatgaactgactggctgagaaaactggctgccaagttctaagggtttgaaacagagattaataaatatctaacaccacagactatggagaataaacacaatacacccgaaaccctctgcaaatgaaagaggcattgtctgagtttaaggtatccttacatttaagaaacaacatcaaaagcagtggtttaactgaagtatgggttgaacatgtttggacaaaatgtagctaagattcctacgaattgtgtatgaatccaggtaagaggtaatttcacagctgcaccaatctgcagatcctagcatgcctccccgatcaccagtgttactgaacggagcctgagctccagcaactgtccctagcacaaagtggagacctgtgacaaacgtgctggaaagccaagcagataggaatcggagaaggaaaaagctggaggccatgcaccaggggtgtttggaggcaagaactctggcaagcccatgggtattcagaggctataagggaaatctaagccatgaaagcccagaagcaagtctaggagagacccaggcatggcttagcagcacaaacatctgcagacaagaagtggcctaaagaaaagtaggtggcagaagtgtgaggagtgagctggctacatgtctccacctagaggatgcttcatggctgttctgtggtttctttacgggatagaataatggcatcacttgttcccaactcttaatcttttgagtgacattgggtattaggtgaccatgtgacttgctgtaactaatgagaagacttaggaacatgagtatgtggtggtgtcatccttcctgccttggtggttgtgacggttccacctggctagatctctggtgtcagcgatgagctaaagcccagtgggtgcatgaacaagacatggttttctgtcctgttttgctttgagaccacgccctcacctacccattctgatgacacagcaaactttattcctgcagagggaatatctgactcacactgtggtctgaatgttatttgctaattgggatatgtcatttgtacattcccaacacagtcttgtgtttataatacacatcttgcctgggatgtgaaagcataagagtgcgttttttaaagtgaagacataaatttggaaaggtatcaaaggctttctcaagtattccataagctgaagcatcaaaatatcacctttatggtttttattgtcatcatctattgcttcatatttactcaattcactcaatttacttaatatttttctttaaattggtgtttgattcaagcaaaattattttgaaatgaatgttcatatcagtagtatacttagacacttaaattgcttagaataaattagtcatgtgattaagtaaaatagtgcttttaacttcaatttagagacctttggtctctctttctgtggctttctgtcgttgctaagtaagaagagatattagaaagtcttagctatgtctagaagggtgtaatggcctgtatatgagccttctcaacccacagaagctacagcttctgtggcttctgttaacatacacaattctagtatgaaaatattaaatggaaaattccagaaagaaacaattcataacctaaaaaattgttatatcattgctacaatttctttattttattagtttttttgttttgttttgttttgtttcaagatagggtttctctgtattgctttggaggctgtcttggaactagttcttgtagaccaggctggtctcgaactcacaaagatccacctgcctctgcctcctgagtgctgggattaaaggagtgcaccaccgccaccaatgcccggctcattttattagtttattttaaccacttacagtacctaattgataaattaatattatcattggtacagatgaatagaaaaaaagtgtactgtccatatagaatgtcttggagatgaagtgcgtctaccctactgtaaacataagtactaccatatgaaattgaatatctagacaacaatgaaacatttccaagcttaagctctgccaagagaaattcccaggtatcataatgaagttactaaaaagtcaatgagtgggtaaaatttctagactagacacaggccagcctaggcctcccagtgcttggagaaagtcatagacccagcatgctacagaaggctctggaaagatttcctctaataaaaacagatgaggaagcctccattctctggccatggaaagattagtgggataggtgtctttgatagaagatgaacagcagcctctaagaaccaaagtaccagtcacacgttaagcatgtcctcatttctatgacctaaatgacaggtgaaacccaaaccaagaaattaaaatttaaattccacttagtatcaaagaagacatatgacctggagtaccagaagaattaagtgtaaagtcacttgaacactgactaggagtcattggaaatcctcttaggaaaaagtcaatggggagatcctctggaacacacatacacacacacacacacaaaaaaaaaaaccaaacaaacaaataaacaaacaaaacaaaacaaaacaaaaaaacaagattaactacactaatggggcattatgtatgaattattgccaagagacttaataaatgggaaagaaagtagcaatacaagtactttgaaagagtgtgaaagagactgcgatggttaaagaataatttttcaactattgtgttgaaccactgagatcaagctgagcatataatgtcacttaaaccctgagagacatgctgcttaaaaagaagtgtctagcgggtaatatggcacatacctttcatcccagcattcaggaggcagaggcagaggcaggtgaatctctgggagttaagggctaggctggtctacatatggagtttcagaccagccaatattacatagccaagaccttggctcaaaatagaaaaaaaagttcaagagtcaggcatgctgggcatggtattaacatcaactgaacacactgttaagcagaaaaacaatatcaaggtaaaaaaggctattatttagtactagtagagataatctagaactaataaacaatttaacaatagaacctcataatatataaaacacaaatgcaatatcaactgaaatatacagcaaatttcatagaaaaaaacttgaatatatatcttagagatctattaatttaaaaagaaataggtcagaacacaggagatctggaggctataacaatagctttcctaaagggaaagtctgcattcagtaagaacatacatgttttcaaactcagcccataggatgccaaaccaaatacacctaaggtcagtattgggctgttttttttaactataggccatacatgtaaaaatcaaccaaaaaactatcttttagagactgagaaacacttgtaagtgatcacacagtaaagcctacttgtcacaacttgtgaaaacagcttaaaagagttcacaaggaaagtgatcttgatttcagatattagaaagtaagacgggctggattagctaagagtgaaactcccacaagaagtagaaccctgttgctgtgtgctttaaagctcttgacattaactcggtatgctctctaatcatctgaatgtcaccaaatggagagtagtgacatatttggaattctgtttaagaatggatctgagtaggttgatagatagtatactcctggtgtttatgctcctaagtaaagaggggccaattacagtagtgtggcactccttgcatcacacagtgggaggcaacctttcacacataatatagggtcgaaattaaatcctttctacatttcacagttcccagaatgagcgtgcgtgtgtgtgtgtgtgtgtgtgtgtgtgtgtgtgtgtgtgtgtgtgtgtgtgtgtgtgtgtgtgcatgtgtgaacaccctctgtagaaaccaggttctttttaataagaaatgagcagtgaaccaacgacacttggcacacacagacaacactgctagatgtaatgtttcctgacaggcatgttcacccagcagcgggtggcacccctttcccagaatatccactgctaaaatttggcaactaaaaaacacagcctcgcaaggaacaatgcagtgggtcaagctggatttagcgattgttaaattactgtttgattatgctgatataccttcgggaaacagttacataaatagaagttttctttaggtcgcagtttctaaaactccccagatttccttctaatcagcaaagatacacgtttgataaaattgctttctccagaaacgagataaaaagaaaaacaaacaaaagcttccctggagtattcactgttctttgttgggtacataataatagttcagtggttagaggagtgccaatttaagatttttgtctgataaagtggctgcaagatttaagagctgtacatgtcacttggtgaaccccagagctcttattaaattgttcagagcaagaggcaggatggcctgctgcaggtttcacactccccttcaccaagaagaaagtacacagcaggacgccaaggtccagcccttaaatgagctctgggcaacaatcccctatgaatctatcccccacatgcaatctccatagccaggcaggatgtagagtcctagccaactgtaagccaggggagaggaagacaggaggaggaacaaaaaaagaagggaacagcaatagagactaagtgagcattcaccctacagcatcacacctgtgattctcacaggacaggaacacaaggctctccttacttgaggtcaaactgcaaaactgtgaaggtgcaaaaagtcaagaaacaaggtgggtggctcctgaggaaggatgctgaggttgtgtagtggtttgaatcagaaggaccacagtagtctcatatactgaaatgctggtctctagttggcagaactttggggaaagattaggaggtgcaggtttgttggaagaggtgtgtcattggggtggggctttgaggtttcagaagccactcccagttagtgctctcactgtttgtctggtgcttaagcatcagatgtaagttcttagcaacttctcaagctccatgctggctcgcctactgccatgaacacttatgtgaatacacacacacacacacacacacacatgcattcacagacagccacatgtgcacataaattcaaagtttaaatcagatgggtactgggcacaatgaacatgcctgtatccttagcgctcgggaggctgaggcaggataattgtgaatttgaggtcaacctggtctacaaaattccagaccagtctcatttatgtaatgagtccctgtgtcagtgtcccacccctctaaaagcaaggttaaattagaccacagcccagtactttgagcaggggcagatttgtagagtgattttacagttcacaaggaaacttactcagacatctcagactcaacatgtacaagagggaatctgccatgtgtacaaatcatctacagtatacttcatctgtggaaggttttaaaaaagtccacaatttcttagatattccatttaaaaggcagagcttaactagctccccctctttcaatgtggagtgattttagtgatttgcatttgaggaacagggtaagaggaaatgacaatgcccaagttctaagattcaatatgtacttaaaggcctatgatttccttttggtctcacttgaatcacggagtctgggttggcaccggggaactgggtgctacgctgtaaggatgcataagcagtggtgcagaaaggtccaggtgtcaaggaacttgacttcctataaaaacccagttaagaggacaggagcttggtggtagagccctgcccccctttttttgtttaagatttatttattatgtgtagagtgttcagcctgcatgtatacctgcaggccagaagagggcaccaaatctgattacatatggttatgagccaccatgtgattgctgggaattgaactcaggaccgttggaagagcagtcagtgctcttaaccactgagccatctctccagcccaaaagcatacttgtactatttttttttcgagacagggtttctctgtgtagctttggagcctatcctggcactcgctctggggaccaggctggcctcaaactcacagagatccgcctgcatctgcctcctgactgctgggattaaaggcatgcaccaccaaagccgggccaagccctggctcttgacagatcccctgcaccaaaattaaatgggtgaaaacccagaatggaagaacttctgtcaaaaatctggagcaagcccagaagcccctcccacttcagatgtcctggcagcctctttacataaagcccaagtcagaactacctagctattctattcttgaattcccaccacacaaaaactggggggaaatacatatctgttgtcttaaacggctaacattgggtataatttactgcatggcactaactggctgatacagtttccttgctgtgatcatggccacacatcccttgggtacccaaatccagaaatcattcttccttagatcctgtatttccaatccagtctgccatacagccctacagattcatcttgcttctctcattcccactggctgtgatgttttgtcttgtcaacttgacttggatacagaaatttctgggatacaaatctttgagcataactgtgagggcatttccagggaagtttagctgatgaaagaatcccaactcaaatgggggtggggggaagggagcaaagcacatgctttttctatgtctttatgattcagtatgaccagaagcatcatgctcctgctgccatgccttcctagccatgatggactttatccgcttagaacagccaaactctactcttctttccttacttatattgctgcttgccaagtatttggtcacagtattgagaaaggtagttgtcctagtagttttcagcttcagctgtcaacttgatgtagcctagagtcatctgagggagtcccaactaagagattgcgtagatcagattgacctgtggtcatatctgtgagggattgtcttgactcccacagcccactgtgggaggcaccaatccctaggcaggtgggctggggaggggggcactgtataagacagcaagctagtaagtagtgtttctccacagtttccacatcgtgtttctggcctgacttccctcagtgataagctgtggcctgaaatctgcttttggttatgatatttatcacagcgacagaaagcacttgaacagaaactaacacactgacaagccacaggttcttctggaagagatattttgacctttgtctctgtttcagatctgactgcttatttcctccagattgctaactgaacacactcgttggtctcaaccttgatgctactttctggagtcctttttcactctagatgtctcagtaacagagtcctggctccagagcagtctcaggaggtctttgtgtctcagccttcctcaggctcctctactcacttagcctgtaagccctgctagtctactacagctcacactggatgtgaccctcaactcagatgtggtcgtgtcccataaaaccctgtgctgacctcagatgcagtcttgtgacattcctttggtttctgatttgaaacttgcctgtctcctcctgtactataaatgaagccagaaatcctggaggacagatattccagtgtagagcatagggcccattcatggtagagacgaagagctattgaacaaaaataaatatttacaggtgggaagattaagagggatgtaaacaagacatatagcatagatgaagactagaatttagtacgtagaaccaacaacttttattttttttcagatagctgtgtagcatagtttggcctagaactcccaaactatctactaggaccactacgccaggctctctcaaataacaattacttattgttgatgttgttgttactatcattattacatgacttttgttcaaaatgtgatttgggaatatttggtgactcagatgtgtttcacaagcaagtgatgacttagagtgcactagataaagttcatccggaggcatttatcaccctccccagcaataaaagctcctccaggacatgaaagcaagtgggatgaggtttaggtaaggaaaaatggaggtcttaggaggagatagaaaagagtcttgtcgttaattcccaagacaacagcctttgctggatgctcaagcagaagcagaacctcctagggcttcagcccaggctcctgtatcctctgcaccctacttaactagctcagcaccccttggcatcaaagagcagtccacagcctactcccagccctgctagtggccaaaggaaacacactcagagggggttttccttcaccccatatcatcatggctttgttttctctccctgtatttcacgggtgtgagaatactgagatgcccgagatgatatggcaccagaaataatagcaacagtaatacacacaaatgcattttcaactgctgtcctatatataaggaaataagcagtcagatctgaaacagagacaaaggtcaaaatatctcttccagaagaacctgtggcttgtcagtgtgctggacagcagttttatatgctgacccaagggtgtgataaaagacctaagactgcctgctccagagcagggcacagcagagattttttcctgtaaagagccaggttctaagtgtgttcagtttgcatgtcagctctgccaatgaacacaaagcatctacagatggtgtgcaagtgaatgggtatgctgtgttccaggggccagggtggagctcagtgggtgttgcagggctctgagttcaacctctgccaaatctttccccctcccaccaggaaaagcacaggtggtaggctaaatatgacctggattgggatgtgtttgccaacatctgtcccagagtgaaagagatagaaaagcattttgctttcttgaagttggatgcattattttttgaaagtgtgaagctttaatattggtgcaagtagcactcctaaatgtgtctgtgttctgataaggagtgtaaattggggtgctgttttgggctatatttatcaaacagttcagtgtgacaggttttgacctgccactctatgaatggtcatgaatatatatatgaacacatatagaaagatgtgtaacattaaaacacaaaacaaaaacggtctgtgagcagcgtgaacttgacaatgatacaaattctaaacattttcctaattgtccaggcaagacaagggtagacccataaactcattgtctaagcaactggaagggcagtcctgtcaggctgtggaaggggtccaggtcttcattcagggtgaacacactactcactcagctttggagggacaggaagctataccccattccttccagccaggtaataccactcagtaactcctctgctcctcctctgtggtcttctatgcacgtgatggttgagtttagtatcctggggttacattttcagagagactttcagggaaacttcgaggctattgagagcctcttgtcatctctctctctctctctctctctctctctctctctctctctctctgagattaaacaatactgcaccattttgccctggaccttgaccactagctgctcattcagttactaaaggaaattgtccactgaaatattttattttaggaaatgaaaaaaattattttgtttaaaaaaatggtaaaggctgactgcagaacctggaaaagctgttgctgctattgatgcataacatattgcaattattgctctttttatataaatataaatatatatataagctaattgaaactcaaatatgtgatgaatccaaggtgtttcagtgagtgctcaactgtgcatgcaaatttgatttcatctttagtaactagtaaagttatatgcttgccaaaaaaaaataagtgacacactggaagacaaatgtcacacaatttcaattttatgtataacctagaaatgatgaacttatgggaacagagagcagaattgtggctattaggcttcaatgtgggtcttttaacaatggggaaacgattggtttaaggatataaaactgcagttggacaagaggcatggactctctgaagtcttgaggtctactgagagcatgataagtatggttgataacaaaagttgtgagatagtatactttaagtgttctcaaaacaaaaatgatgaatatgtgtgatataacatgttaattggtttaatttagccatgccattgtgaacatactgtattctgtatcacaattgtgtatgactttatttgagctaaataaatgaataaaaaaatcaaatacaaaaaaatgttaaaggctaatctaaatgaccatcaataagaaagtaatgaaatataacatgacattcattatagtaaaattctaagtatattggtgtgtaatggtatttaagatatgtataattaaaattcaagttaataaggtggcatgctttgagtgatactatttacataaaattcactacacacattttcaggtgtgtgtgtctaggataaaatataccatcaattgtgaatgtctatatgggttaggtatagaggaggagggaatttatttttctttgtctaagtttttaaaacacaagcatttgggaaaatatgaaggaatttgaaagtaataaaattcttaaggaatttctacaaatggtacatggtggtgaatacctataattccagtacctgaaaaggggagacaagaggatcagaagttcaagattatactcagctgaattgtgagttcaagggcagcctgagatacatgggatcctgtctcagatcaaaacaacgcagggcaggcaagatgactcagtcggtaaaagtacttgttaccaagtctgatgttatgagtttaatccccctgacctacattactaactgtcctctgacctccaaaagtgactaccccaaaaaataaatgtaaaagaaaaaaagcaatataaacaaacaataggctcaaggatttctagaaatcatcacccagacaaattcaaatcacaatgctcagtaactcacaattttcctttgtttatgtgtagcaatagtagctgttacccggtgccagattctctgggtttttcatatttctctaacaaaatgtaggaagaacaaagcacagggactgaaatgttaacactgtggaggaaagcctagactgcagtcagccagcactacacagccgccactgccctctctggccgtggggccatcatatttgttcatcttcacaagtattttctgatgatgtaatttcagaaggcagtggaaaaaatgaaaatactcagactctgaaagcaatacctgctgctcacagtagttgctctgtacagcctccctgaccatctttttagtcagttatcttaaatcgacataattccatctcattttgcatccaatttccagatctatatactatcttttaatagtttctcatgcccaggacctattttttttccacattggtctcttttgttgctgctttgtctgctttgttagaatggctgtttctattcttgcttttgtcttaagctttgtatttctttattagtatttgtttagttgtgctatattttgtccctgagggacatgaaaatcaaatcaaatcaaatcaaaatgaactcttagactctaccaaaaacctccctgactccaaatgtctttacattatcctctctagtcctggggttcttcctagggtcttgcaaaagcgagccaagcgttctatcgttgagccatactctgtgcccttaagccattgttttctattcctgtttcatatgtggagagggcaggttctgtccagacaagcataatatgagatcctgcaaggcagatggaatgataggcatggcaatagagaagtcatgagccactgctctgtctccttggtgatctgccagcacccatcatcattttctgggcttccttactgatgggtcaatcatttcttgctttcctctaccattaaattattttatgtgttctgtatcacacaagtcactgtctggttgaaaatcaagtggtttcctgggcccctcagaggactcgtcagagatacctggaggcagccagcttgtagcaagacacaggtagattctggaatccacccagctgtcagcaatctaacagctccagtttggaagacagagaacagggaggattgaaattcaagtgtcccctgtgtccacgggcaaatgagacacagagctgtggcacatatttaaaccatcatttcccaaagtctgcacctagttctacagaggaaatccaaaagttctgggccaaataataatgggaaatgacagagatgatctaagggccctccttttcagggcccttagaatgtacatggttctgctacagatcttaagatactcggtatttgacatagtttcatttcaatgatgcaaactttttttttatctttttctttacaatgcattttattctctgaactagcatgttagagaaaaacacactttgaggatcactgagtcaggtggcacatgctggcctctctggaccttgtagattgcacttaataagaatgtggtaacaacaccacatggcagatataatgaattgtttcagtctattctggtggggaggcgtggaagaacagcatggtttgtggaagtgggggtgtggtggaggctgttcacatcattgaagaacagaaagctgagcagaaaagagaaggaagctaccaggcagcagctataacttcccaaagtctgcctctaatgacttaagtcctcagctgggccacacctacagcatccagagcttcccaaaacaacaacagcagcagctggggaataagcattcagacatgaaaccacagggggcactttagattcaggctaaataacatcatcttccatctcccaaaagacatctcccagcaccaaaacacattcagtctgacatcaagagtccccaggatcaccagttccccaaactgctcaaaagtcaaagttcaaagtctctcttgagactcaagacaaaacttttaactgtgaacctttataaattcaggaagaaagttgaaaacgtccaagacaccatgaaatacagtaaaagtctccattctagatgtgaggaataggaccacaaagaggacagatgggaccaaagcaagactgaaaccagcagggcaaccattaagtcatgtggcaacatgtctggcacccgaggcaattggtgacatgatgtgggctcctatgggcttgggcagccccatccacatggtcttgctgttcacagcttacgttgcctccctcttgggctagctccactaagtgcctattcctggcaaacatcccacatgtctggcatctccaataatccaggtctctccttccacttctgcatccctctcatagttacacaaagctttcttgagcctcctcatgggaaacctgactttgctacacatcacctggcctcacagacttttctgaaaacatgagtgtaggcctctacaataccgtaacacctgtgtcctgcacaccttcaagagcggtacagtgtgcataaaaacaagtcctgccaccagctcaggaagcaaccaggcaaccttggatcatagctgtagcagcctccagtggttaaacctggggggaatacccctgtgcagccttgtacgaatggagtgcctgaggaagagcagcctcttttaaaggaatatctttcatatgggtttgcagttttataccttggagtctgaaaaaggtggaacagccaatgcctggattgccctcaaggtaccactcccaattgtccagagaaaactgagtagctgctcattaaggacactaatctctgtaacggtgctggtttctttgtccaagctaaggatgctttttttctgatcactatttcaaatccttcttctctatatttttctctagattctcactataaatctggctaaaagcagccagcaattacagtaatctgaacactgtgttgtcttgaaattgcctctatcaaattaatacccattatgtttgaattcagtttcattcagtttttgaggacacagataaacagaaagtttttgccagaatgtcacatcagtggcatctggtccgatgtttcataaagtcttttctctcatctggagcctcataggcacagtctttgcagtgagtatttctatgaacatgctggctttccaaccctgcaccatgatggcacattaagctacaggattctaaggctttcctagcttgcctcatcaaactctcgaatgcctcccacaaagcagtccagcggcccaagagccacgtgttagcaatgatcctatttctctggaactacctttcttttctttctttttttccttcttccttccttccttccttccttccttccttccttccctccctccctccctccctcctccctcctcctccctcccccctccctcccttcctgtctatctttcttttttgtttttttgagacagggtttcctggaactcactctgtagaccaggtgagccttgaatgcacagagcactgcctgcctccgcctcccagtgctggcattaaaggagtgcaccaccaccaccctgccaggaaccattcttcttattctcacttttgttctgctgtatcctaaatacctgacagaagcaaccaaagggctgaagtatctgctttggtgcatgatatcaggggtttagttcataacaacaggaaaggcatgagagtgctgctcagcacacagcaatgtgagcatgtggtagacctgttcacatcatggtgtaccaggaagcagacagtgtgacaggaaccaaaggcaggcataacctccaaaagtgaggactgccaaatagtctcttcctcctgctccaagctgagaataaagcatttaaaatataaggtatagtggtcatttcagattatatataaaattaaattgtatgtttaaagcataaattatattttatatttatatcataaatagcatacattcctacttttaccactacagatggtcactactaacgttttcagaacacagcagccccattatacttagaagtgtcaaatctagacaccagataccccaacccaacctgtactgaaactacagctaactcccaactctattcacaccatagtttttctttatcgataccccagatagaatataatttataaattaggaacataagaaattaataactactagtaaaatgggataatcatactaatataataaaagttatttaaatgtgaagacaagaggattataattttgtggccagcaaaatttagcaagaccctaaattttaaagggctagtagtataagatgcttacctagcatgctttctgtcatgatttgctctctgttcctccaacagacccaatctatcaggctaacagacccaatccctagtgctgcaatagaacaccagtttcccttccctgactgttcattgattgtgtcccacccccagttcaggtggacaacccctgctcaaccacaggccatgtctaccagaagacctagtagcccaactgcaatcttctctgctctctctgttccccaagcagatctctctgttcatcaagcaccagtcttttaggctcatcccagctgtagcctcccttccctcccacatatctaactcctgtggaacccacagaccaccccatcctgccctcccagaaatcagcctctgaacatataattgccccaaacccagatgcctagatagcagcataagaacacaaatccaagatgacttttcagttcttaaaatctatgactcaaacacaaggacacccgattttgtaaaagaaacactactacagcttaaatcacatactgactctcacacactgatagtaggagacttcactaccccactctcaccaatagacaggtctcccagacaaaaactaaacagagaaatactggagttaacagacattataaaccaaatggacttaatagatatttacagaacgttttacccaagcacaaaagaatgtatctcctcagcacttcatgtaactttttccaaaattgaccacatactcagacacaaagcaagtcccagcagacacaggaaaattgaaataactctctgcatcctatcagaccaccatggattaaagctgtatatcaacaacaatagaaacaacagaaagcttacaaactcatggaaactggacaactctctactgaatgaaaagtggatcaagatagaaataagaaataaagcctttgtaaaattcaacaaaaatgaatacataacatacccaaacttatgggacataatgaaagtggtactaagagggaatttcttggcattaagtacctacattaaaaaatgagaaagatatcatactagcaacttaacagcacacctgaaagctctagaacaaaaagaagcaaacatagtcccaagaggagtaggtgacaagtagtaatcaaaatgaagtctgaaatcaataaaatagaaacaaagagaatacaaaaaaattaatgaaacaaagagttggatctttgagaaaatcaacaaggtggataaacccctacccaaactaactaaaaggagagagaatatccagattaacaaattcagaaatgaaaaggggaacataacaacagtcaatgaggaaatacaaagaatcataaggacatactttataaaccagtactgcaccaaactggtaaacctaaaggaaatggataattttatgggtaggtaccactcaccaaagttaaataatatcagataaacaatttaaatagacctatagcccctagtgaaatggaagcagtcagtaaaagtctcccaactaaaaaacgcccagggctagacagttttagcacagaattttaccacacttttaaagataagtcaatgccaatactcctcaaattacttcacaaaatggaaacagaaggagcattgcccaactcatttcatgaggtcacagttaccctgatacccaaaccatataaagactcagcaaagagaacaaaacatcaatttcactcatgaacatagatacaaaaatactcaataatacttgcaaaccaattctaaaaacacatcaaaaagatcatccatcatgataaaataggcttcatcccaaagatgcagggatggttcagtatatgaaaatcagtaaatataattcagcattataactgacttaacaaacttagaggaaaaaaaaccatatcatcatcttatgagatgtagaaaaggcctttgataaaaatctaacaccccttcattataaaagtcctaaagagattaggaatacaacaaacacatctcagcataataaaggcaatttacagtaagcctatagccatcatcaaattaaatggagagaaactcaaagcaattccattaaaatagggagcaagacaagcttatccacactctccatatctattcaatacagtacttgaagttttagctagaacaataagacaactgaaggatatcaaggtagtacatctgcaaatatcatctgcagatgttatgataatattggcacaggagacaactttctgaacagaacattaataatacaggcactgagaacatcaattaataaatggtacttcatgaaactgaaagcttctataaggcaaaggacaatgtcaacaggagaaaatatcagcttacagaatgggaaaagaacttcatcaccttcacatccaacagaggactaatattcaaaacataaagaactcaaaaaactagatataaaaacaaaccaaataatccattttttaaaaatgggatatagatctaaacagagaattctccacagaggaatctcaaattgctgagaaacacttaaaaaaatattcaactccttagggaaatgtagataaaaactactttgagattccatcttatacctgtcagaatagctaactaagatcaataacacaaatatcagctcatgctgttgaggatgtggggcaatggaaacctcctccattgctggtgggagtgcaaacttgtagagccactattaacatggcagtttgttagaaaattgggaatcaatctacctcaagatacaactataccactctttgtcatgtacccaaaggatactccctcctgcctcaagatgcttgactaactatgttcattgtggctttattaataacagccagaaactggaaacaacttacgttgtaaatctggtgtctcctgccaatcttcagtggccagaagtggcagcgcatttccattgtcctgtcactccaagttgagtagagttgtgtagtaacatgtacccattttaaaggtcctggccacccattttagaggtctgtcttgttcattctctatgtctcctggtctctctgtctgccccccaccccgacccctttctgagatggcctttcactctcctcatccccaataaacttcttgcattagatttgttgtatgatgtgatctcttagcagcacaccttggccaggtctgccaaaggtacctttttgccacttttatcctaacagcctagatgtccctcaatcaaagaatggataaagaaaatgtgttacatttacacaatggattattactaaggggctaaaaaatgacatcaagaaatgtaacaataactctttccgccagcttcctgagttccaccactaggtaggggcccaaataacacacagtcttatattaggtacaatgctgcaggccaatgactaggatttcttatctgctagcacaggtttacttatcaaccataaccattaatctatatattttataaagacttatcttaccaaggacactggccttatgtgtcctctcttcctgggaaatcacttggcgacccctctttactacatttcccagaatcctccttctctcctagtccctcctatcttgctttcctattggccaacagtgttttatttatcaaccaataagacaaacatatacacagaaggatatcctccatcaaagaaatttgcaggcaaattggatggaactagggaaaaaaaatcatcctaagtgaggtaacctaaacccaaaaagacaaatatggtatatattcacttataagtagattttagctgttaagtaaatgataaccaagctacaatctgtagacccagagaggttaggtaaagaggagggcttcagagagggatgcacagatctctcagggaaaggcggggatgggaacaggagggatcaggtgtggggggagatgtgatgaagggagagagtgtggagagatggctggtattgggaggcatttggggcacagtgtgtaaacccagtcaagtggacacttcctgggatgtatgagggagaccagagtgatgactcagttaatgggggatatggaatctgaactggccatctcttgtaggcctgtggtggtactatgtggcatttggttgagttagcagaaggggccgtatggagatctctaaacaacctagactgatgctaaggaaaaagaaaagaagcaaacaagccagttaaagaactggtagcattttaataaatactatattttatttctttaaaaagttacaatttatttatttatgggatttggcatttaatatttttggatcatggttggccacaaggaactgcaatagcagctaataaaaacaacccttaaggggctgactgcatttagatgtaacagtgtttctgtttctttcttcctttttgttgatgacacatccatttcccctaaaagaaccattgttccatcatgccaagtacagggattggtgggttgaggttaatccctctgccttcagagataatgaggccaggttagaccagccaacacagtctgcaccctctgtcaatcattggtattagggtgagcatatgatctaaattgttccagttagactcaccccagactctgctggtaattggaagaaaaagaagtgttttctgtgggattgtcagctgacagccatggaaacctcagtgcattgtagcaaaaataactcaagagctgagaaaaagagacaacacagaagggtgaaaaaaggaaggaagaaaaagaaaaacactgactatatgatttgaacttctctacacatttctgcctagaatcagatcagttcctgaattctttgtagtatgaagtaactaatattctttgttaacttaagcagggtaaattcagtttttgccaccagaaactcaagagttggtatgagagataaaacagatttggggaaaagcaaaacaaacaaacaaacaaaaaaaccaaaaccatgtaatgcccagatgtctttatttctctttttgtacttattccacaaatattagttgattttctaatgtgtcctggaggcattgaagggttctgggaatgtagaggtagtaaaacaagtgagtttatatgtgtacatttctgtttatgaacatggggtaagtgctccccgaatactctgaagcaatagcctgataggatactatttttattgctagttaatagacatattttaattactatatatttttatttgctagcaacattaattactaattaataattacatatttatggagtacctgggagggactttccagagaggagtaactgagttgggagaacctactgtgaacgttggtgacaccattccataagctaggggaccagactaaatagaaaaggagagaaggggaaatcagagttcaagagcaaggcagcaaagcttagacatccaggacagccatgatgaccatgccatacctccacaccatgatggactgatgcctctgaaactttgagcccaaataagtccttcctctcttatattgtttctcctgagtacattcatcacagtagcaagagagggaaaaaaaaaaagactaatggacatttcaaagagatgactgaagtagttgacaaaagatgtactatattactactgtcattatttctgttcttagaggatttggatttaagctaaacattctgtagtgaccatgaaactcacaccattattatttggagacagggtccaatatagcccatactagcctcaaattcagtatgtagctaaaaatagctttgaattcatgatattcttacatcaacctcacaagtgctgggtttagaggtatggactaccatgtctggttatttcagcaacaaggactggacccaggcccttgcaaatgcaagacaactatctaccacctgatttaaatccacatcccatcattgtgagtcttgaagttggtcatggaacccagaatctaaggagcctgtcaccaatgatggaactctgagggattccttatagatccattgtcagctcttaaagtatctgatataggttgaattaatttccccaagttcatatattgaagacccaactcccagtatgtgaaatatgattaactaaaaagtaaagatacactgtgaatgtgagcaatatcattccatggtctgggacccagactgaacaaaagagggaagtttttgaagaattcattaaaacaaggtaattgggcagggtcctaatctaagctaactggtgtccttgtaagaagaggggtttggacacacagaaacacagaccatgagaaggcagcaatatacaagccaaggagagaggatttagaggaaactgaccccgctaacatctttacctcagattctgcttccagggcgacaggaaaatagtttcacagtataagtcattctgtttacaagactttgttaaaggaacaactaacatgttaaacaaacaaactaacatgggggcacaatctctgaaaaatcactatgtcacaaaggagagctttctagaaggagcccattagtccttcagttcatctcctctcagatgtcctctacagctgccaacagatctagaaacacacacaagttaagtccccaggatgaggagaaacctttacttagacatgccctactttacagtttaatcatattctacaaatctaatttacgagccttgattaattttctactttcccaatgggtacatcgagcaggcacacaggattgtagacctcacagaaagaatggattcatttagttgttttgttttcattggtgacttcaaatgcaaatgcaggaagctgtttatggagaaactgtcaatgctgttagatgttgttcacagagttacagtacaatgggatttcatgaccctgttccataaagcactctcattttctcaggtccctggtgatagataatagcactgggggtggggctgaagatacggcttagaagagaacttactgctctcccagaggacccaggtaccattcccagcacctcttcagtggaaagtaagcaatagctaaagaccagtgcacgctcactaagctagtaagaatcaagtttgagctaaactcaaactggaaaataaatgaataacacaccatgaaagactattatagggggtctagtctctcaccgtacagtaatgagtgaggcttgatgacctctgactaaaacacaaaccaagcattcccaaggcctggggagacatggggcatgtctctgtccatccctgtctgctttttctccatcaccacttccaatttttccttaactcaataacatcaactctctcatcatctgtggtacctgcctaatctatctcctgctccactgcatgtttggggtcataatacggtattttttgttcctgttttattttagaaagagctagatacttctagaacttctcatttcatcaaactttctgagatatttctgggataggaggtgggaaaatgtgattgctaactggtgacatttttattcccttgcttcgtgattctcctgattacaggtagcggtagctcccaagctgggtttgaataacatgaaaccttgcttttccaagcagtatggaaagggtgtggtttggttactggaagagatttttgaggaaaagtaatatctgtctataggtgaaaatatacctgaatcaccatggcttccaaaccagcttcccacgagccctggtgttccctgcttgcctctctgattgttctggtaaaagtttaacaaacatttgattgttggcagcatacagaagtgtgaaaccagtctaggagaggggattgcaaagcaaatggatgagaaacacatttgctctctgtgaatctaaaaatcaaggagactaaagggaaaagacagacaaatccaacaaattcacccaaaacagcacaggaagggctagctgctatggtggcaactgtggaaatggagacacaggaagtatgcttctggtgacaggtgtgcaatgattgagctgaggtctccagataagagctggcgaataatactgcctgtaaacctcggaagcaataaagaacaataagacagctttcctctcctgtattctccctggcccctatgcctgccatcaagacactcgttgttgttacaatctatgagtcactctccagagcttgtcatgggcatgggcgggcatttggcctgatccctgtcccagctggctagtctaagatgactcacagggccactgcccatgagggaaaggataaccaaaggaaaatctctgcttgttcttcatgcctttccccactactataccacagcacattcaggggtctgcaggaagcctacggagaccagggtgaactgtggggccacagtaggctgaagacagacctggattttcattttcaactggtgccattgcctgagttggctagagcttgctctgaagaggacttgcacttcttttgccttgcttatattaacttacaacaaacaactcaccaaagctgcaaaatctgccttgatgaacgaacaaatgcctgacctcaagcttgctaagtccctgagcaatgatcccctgggtcctccttgtttcccatttccaagccctacagctttcttcctttcttcagttctgaaactgcctcccaccttctcatcccaggcccatgtccagtcctcatagcatacaatcagatttttatctgccaccacattgaatcccactgttaccacatcattgaggcagtcagttctaactcaaaaccaaaaaaacaaaaccaaccaaaccaaaaacattggcttccaaagccaacataataccttcaatgcaaagttttttgttgccatctcaggctcaaccatttagtcagtcttgccctaactcccccaaacaccccactttacaggcacaaccaaattctcttagtcttccaagtgttgccgaaggttttcttgactatatttgatttaccagtttccccccacccagccacactgccggaagcacttctcccaatctctaaactccaccctatccccaactccaccctatccatgaaccttgctcttgtcctctcccatgaaggaccctcttttaccttgaagcacccagagtccctcagttgcccctcttactgaattgacttaattctgttcttagcaagtcagttgtttcacttcctcctccccatgagggtgagagaagagaatgaaccctaattagttttagagaaaacgcagcctttagggaaaatattgtgttcagaataaatatacaagttctgagagtttggtttcatttcctaaatataagtgcaaaatttataaacaaattaagaaatatcacctttctcctgaaaacagacatgaggtaagtgttttgttttacccagcactgagaaattgaaatactatggactaaattttgctaaaagcccaaaaccactgaataatgtaaaactaaatgagatgagaacagaagttcactagggtgcaccaaagagagacccacccatggaaaagttaacctgacttcttgttaatgggaagaggaggctgttagcctgaagcacactaggctccaagctttgtttaggatctagaagctaccttccaattacaaagctgcacctctggggatgcttgggtgctgctggcttcaaataacaacagcctcatctttttatttgcctttgagttacagggccaggaaatccaagccatcttaaaacacaatttttactatcctacaagagtttaacttgatgatagagatatttctagaagagcaatggggtcttttgttgttttgttttttttgtagtgtgcagatatgaaatttctcaacaattaagagaaattccacagcctattttctttgctatttaaatttaattatcctagattttatgttctgggcatattaccaattataatgccaagaaaactttcatcaaatgaagagtttgaaatggcttagtcagaagcagctcccatcctcctggggcaaggggggctgatctgggggggaggggttgggtaagggctggggctagagctagagctctgagctggtggtggtggggtgactgggcaagggctgagctgggtgggggttgggtaggggtagggtgggggtggggtagaggctgaggctgggtaggctgggtgggggttggggctaggacttggcactctcctggttgggagtgtgtttggaaactagtggcatagtcagttatcagtgactaacctgcaattattaaaaatatgcccccctcacttaaacacatccagtgatccattcccaggcaagaatctgcctcacatctcttctgccaggtgggaatctagtgttattgtctaaggtgtaagctttgattgcttacacactttactttcttggtgaaacactgacatttcgtgtgtaaaactgtgcttctctctcttgattttgaaaagacagggtgaacaacagaagcccatttttgagggtgacctaatttctgtagcatagaaatcaggtaggttgtaaacgttccaagattcatcagagaaatatagagaagtggatgttatactagcttcagtaacttttagaaacatacaaaatgtgagctcctggatactagggcagtctgtctgtcgaacacccaagcattatagtcatcatccctcaagagtcccaacagtttcaaaatggtcacttcctctaattttctatctgcatattcatcctagatataaaggaatagaaaattgattatagctatgcagaggtgtgttagataattacctgcagccaggaagggggcgggcaagcaaaagcctgcatgcatgtcccttggttctgagcgtgtcagaatgaattgcagttctccggtgtcaggggcgaggggccgggcagaattcagccttctctcccccactcctccccgctccaacttcctagcagcagtagacaggcttccagaaagacagtctccatagaaatctctcctcacccggcccagtcttcctaaagtctgaccaggacccacctaccttctgaggatgacaggaggcttgctagcgggagggcagggaggatgcgcgattctggctcttcagcatctcccttctggagcagttaacagcgagtacagattcgcctccattttctggtcacgtgatccctggcacatctaaataaagctgatcacctgcctcctagatctcctagtgcttcagcctactgtgcctgaggccacagccggctgaagctgggcagagtagcattggggactataaaatactctctctggcttatgtcacaaatcctctccttgaatcttcatgtcatttcacgaaagctgctgccactgctgaatgaggctggatttgaatttcttcaacccataagtttgaaagaaaccttttgaacacacacacacacacacacacacacacacacgagagagagagagagagagagagagagagagaagagagagagagagagaagagagagagagagagagacagagagacagagagacagacacacagagagagacagagagacagagagacagagagacatagagacagacacacacacatacacacacacacacagagagagagagagagaaatttagagcataatgaacaatgcttaagataatccaatggaccataaaagtataggagaatagtcacagaaaaaaatcagaaagctctagaaaagtcagaatgcccacccaagattcatacagcactgactataaggaggcagaggtttgtgacagttatgtggcaaaagggtttgagtttgaaactaacctcacttagtagcaagtttgcaggaaacaaaacagcacagtgcctcaggctaccagcttgcagataacaatactaatgctactttaaaactgtaagataacctagggtcttgtactcaacacccaacaacctcataaaccaggcatggtgatcatgcccataattccaccattcaggtagaagcaagagaagctcaaggtcatcttcagctccctagcaagtttgaagccagctagtgatacatgagatcctctccaaatgaatgcatgaatcagtgagtgagtgaataaatgaacaaatacaaataaataacaaaataaaaatgccagcagaaatactgatgcaattacggcaaataaaacattaaaggacatttgcataacagaaaggagcataagttttagtccaactgtttttttttttttattttgttcttttttgaaaaggagtctcactcagttgtcaaggctggcttcaaactaatggtggtcctccgttctcctagttctgggattgcaaatgtgagtcaccatgcccaaactttatgccatctcttaattagagcacttaaaactcaaagtttgggggtggagagatggctccgtgactgagtatgcttatctgttcttgcagaggacccaggttcagttcccagcacccacccacatcacggccatcaataacttcagctccatgggatctcttgtagcctcttctggtgccagcatgcacaagcccaacacataaactcatgcagatgtaagcacacacacatacacataaataaaataaatacattttagccgggcatgcctttaatcccagcacttaggaggcagaggcaggggaactctgtgaattcgagaccagcctggtctacaagagttagttccaggacaacctccaaagccacagaaaaactgtcttgaaaaataaaaataagtaaatacattttaaaacctcagagtttttgtaaagctgtaggctttatttttatgattatcaatctatgttgccagataaataaaacatgggtggtcataatcataaacatcaatttgaaaaaataactagaaatcctttatgttatacaaaccattttggggggtaggggtgggagcagggcttggagagaaagggactgtgttaaaatagggtgatggaatagtttggggtcatctctaactgatgtaatgccaacaacaaaaaaatcaatttattcagcagagtgtggtgctaacttaagaggtttgagctccttgaatgaaggcatttggtaccttcctccttgctctggggagggacagcaaggaaagaaaaaggggaacacatttttatatctttacttaactaaaagtctacaaaattcattagaattcccaggcatggtcgcgtataccttgcactgaacacctgacaggcagaggcaagcagatttctgtgtgctggaggccaacctggcctacaaagcaagctcctggccagtcagagttccacagtgagactccatcttaaaacaatcattagaattatgagtagttatgagaaacacagcaagtaacttattcagtgatggccacactatgattgcaagggcacttctggggggtagaacttcagctaatgaatagaatagtggctctctcaagtcagaatgagccacgctgtattaagagagaaggctagccggcctggggattgcgtctctttggggtgaaggctgggaactgttttcaatagcatgttttaaaactcaggagttgctatggaaacggactaaattgtggataccagtggctcagaggttgagaacacttgctactcttgcagaagagtttgaattccagcacccatgtcagggggctcacaactacctgtaactccaacaacaggggacctgacaccctcttctggcttctgcaggcacctgcaatcatgcacacaaattcacacgcaaacacgtatacaaatttccctctgactggcaggatagtctccaggctgtactaaggtgaagtgaagtcctgtctcagagttagcacttgagcaaaagtatgaatttattttgatatgaaagcagttacttttttttttttttttttttgagaatcactacttaaatgcaataaatggcattctggtagacatcacattttccaagggagttgacattattttgatagaacctaattgctactttccaatgaatatttaatgaattgagtttcaaaagtaaaatttaaaagatctttaaagatgatatgttttcaactgctgctgtgtacaagatgactaagtagaacaattgctttttctaacaaggaaagggattcatagtctgaagagattgtgacagccatgaggtagacaacagatggccaaaaatgaccaagaaaagccctgaccaggcatacctatttttcttgatgaggttcagggaagtgaataacaacacttcaagaaagctaaagggctctaaaaatcttggggaaattacaatggacagaagttcagaagcacaaggatacaagtaaccatggtctcatattaaaagagaaagggctttttttttaactttatgaaagaaagatgtcatatcattcaccaacgaagtgcagtacatcccttggaaaagggaataataaacacttgacatcctcattaaaaacaaagtacgatagctgtgtatggtggcatagacctgtgatcccagcacccaggaggcagagacaagaggatcattcaagttaaagggcagcttggtctgcattacaagttataagccagccatggatgtgtaatgaggccccaccttgagaaagagtgagcagggaaaggggggagggcaactgcgctgggcaaatggttttgattttgttgtttgtttctgtttgttaaatcaggcaaatttgcaaggcacttaatatttggcaggccctattctaagcatcaggggtattatgcttcataagacaaaccagatttctgccttcttcgaagttacactctcacagatggagacagaaacaaaatcaacaaaatcaatgaatgggaactctcttcagatggaaaccaagaggtaaggttaaagcgaagccaaagccgtgggatggaacggcctctccagtttgcatgtggggctgtgggatgttgtaggatgtcacagaatccttcatcctacctcagctgtgtcagtcaaaatgtctccaggtattagcaaatagaaggggcaaagtcattgctgatttgggactggtagcttaagttctctaatcctggagtgacttttgatggcctttgtttcaaaaggactcccacagatcctggggatagaccctgtactgcactagagaacagttcactgatcaggtgactgactccctgtctctgtgcttctcagaggctgaggccattgctctcctcttcagccaactgagaagactgccatctgtttttgcctctagctcttctttttccatcttcctccctgcaggctctctcacactctgacttccaggttgttttgaccagtgaaggctctgctggcagatgagagggaggagggagaggaggacaaactcactggactcccttctcatgtgaggcagacaagtattagttgtagcttagccctggaccctgtttgtgctggctctctctctctctctctctctctctctctctctctctctctctctctcatactggacatgtacacacagcaccctagttacttcacctgtacttactatgtacacacctgtacttctatggaggtttgatgagaatagtaactgtaggctcacatatttgaatactttttctgcagttggtggaactttgtggggaggattaggaggtgtggccatgttggaggaggtgtgtccctgggagtggactttgatgtttcaaaaacccacagtgtcccaattagcatgtactctcatttcctgtctctctctgtctctgtatctctctgtgtctttgtctgtctctgtctctgtctccgtccctctctctgcctgctgcttctgcatcaaatgtaagttttcagctactgctccagcgccagtctgcctgccggctgccatgctccccaacacagcggtcatgaactcatcttcagaaattttatgaaggttctcaaatcaatgctttcttttatacatttccatgattatagtgtctcctcacagcaatagaacagtgactaagaacaccctttaccaaataatgtgagtaggaacttcagaaacaccttggcccacttgcatcagactacatatactgccagttttgaacaacagtgtaggtttctctggctctaataacaaccaaatttagatagtctctattcaaatatagttccagtgtatcaagtgatagatacagcctgaattggctttggatacgtatgcagtaagacaaactgaattcttcaagtaaaccttgtgtaattgtatgtatgattaaaatcagatgcattttgggaaggggcatgtattgtggaagaataaatatatgacccaatctattaatcaaaatgaagaccaacccaatatatgccttcctttctttagatctcatagaagagacctcaggctgtaaatctggggtcccggagtagccccattcatgtggcttgtatgctgacagtgtactcccctaccatctatatgccccaagtaaagtcacttggcttttggatttttgtttgttttgttttaaaatctttacaaagccttgttttaattctttggaaaagaggccaagaacctggaagtatctggcccagaacccaacccttggtaatgtgtgtggaccactcagactggccaaactccttcaggtggttatccttcttcttgctgttccttctctggcctaaatcttcctgggttctggctgccactccattcacccctggagccagggcacttactatcagctatactactactactgtccctgggccatgctcctcactctctgccaccacctttggaaatgtgactggaataaatctcccttgaattttcctaatttgaaaatataatagaacatctttcttactgtgtcctcctataccaagacatctgctttagaaagctatgatatcggggctggtgtgatggctcgtgggtaaaagagcttgcggtcaaacccaacaacatgagttcaacccctgggggtggcagcatacgtggtggaaggagagaatcaactccccaagttgtcttctggctgccacatgcgcattgcagcatgcatgacaggcaggcaggcaggcagacagacacataaatgtaattaagaaagaaagccaggctgtctcatctttcttgataccatcagcttttcctctgaaggcagcgctgccacttacctggcatttcaaattcagccaggggcacacactggactctcccacaggctagcagccagcagcacagatgggcaattctgtgctgctccttcctcagagcagccatgtgacaccactcattttggcacaagagcctgcctcctgttgtacctgagcacaaagcaccacacctacagacatttggaaagtggaaagaaacactgaagggctctggcttccttctgtcctctccagccccttgagctagaaccacacagcctcagcaggaaacagccaggaacagaagtagcccgctcagctctgatgagaaatctgtgttcaggcactgaaggagctgggggtgggggtgacaagattgggctgtcagaagcaagatctgactcagccgctttcaaaacatctcatcaaaaactgactcttaagcctttcatgcctttcagtgggcaatggggaaatccaaacaaatcaaactacaggagctgaagaaaacatgtctttccgtgactgtgctttagtgacaagcactgggatggaaatgagagagagaagttaagggtaaactttaccatttcttggcttttgtttgtttgtttttttgagacaagatttctctgtgtagctttggagccttcctggaactcgctctgtagaccaggctggcctccaactcacagagatctgtctgcctctgcctcccgagtgctgggattagagacatgcaccactaccaccaccacctgcccagaccgttccttgtttttaatgacatcggcagcctatttgctcagtttactccatcaaggtgggaaataggaccagcaaggcttgtcctgtctcaaatggcaactaggtagactaaataaaacgacattcttcttaacaccccttacgggaaggtctgctctcatgtgggtggccaggaagacacagttgtggggtgaggcaggaggatccaagaggggggtgggcgggtggggggagtaggggggtgggtggggagaagacagggagggagaggaaggaaattgcaatttagagagtgcttagttatatctaccaaataggcttttctgtgcccctgctacccaacaccaacagaagtctattttttcatctttgacatccacataagtgaagagaaccaatggagagatgggttatgggtactgttcttccagagaatgaaaataactgctcataattcaactccaggggatttgatgtctctgcgggtaccctgcattcatgtgcacaaacccatacacaggcacaggcacagatacacagacacagacagacagacagacagacagacagacagacagacacacacacacacacacacacacacacacacacacacacacacaattaagaagtaataaaaataagtacttttcaaaagagaggaaatggttgtattaacacctgagaagcatggtttctgaaggtctcatgaaaaacaaggaaaagtctaacagagccattctttcaaaagacactgcagctgggaggtggtggcgcacgcctttaatcccagcacttaacaggcaaagagctggatctctgagctcaaggccagcctgtgagcttcaggatagccaaggctacacagagaaaccttgtctcaaacaaaaacaaaaacaccaacaaaacaaaaagccagatggatagtctgtttgaaggccaactacattagggagcactgaggacctcccctctcagagcaaagagacaatacaaaggtctaggctgaataccaaagaaagacacacatgacaggaggaagtccatctctctccttctcctctttgtctcattgccccttttctgcatacatagctctccaaaagattacacaagtattgccactttgtgctcagtattattggtaattatttccttttcatcacttttcacacctctgaaagtcaatatagcaaatagtgcagttttttgtagttgagatggtgggttgaacagatttttttttagatttatttatttactttacatgactgaatgtcttacctgtatgcatgtatgtgtatcatatgcatgcctgcaggatcctctggaactaggattatagatggccataagttaccctgtgatgcttgcaatcgaacccacgtcctctgcaagagcaacaagtgctcttaacttctgattgatctctctattcccctaggttagacagtttttaatgagcaggttttgtttctctggtaaatactgactagtatttaataacatcactgacacttttttctttacattttcttttttgtgtgtctatgcgtattcttatgttcctctgtgtgtgtgtgtgtgtgtgtgtgagagagagagagagagagagagagagagagagagagagagagagagagagagacatgccacagcatctgtgtggaactgtaaggacaacttttgggacttggttctctccttgtaccatgtgggtcctgggattgaactcaggttgtcaggcttggtagcaggcacctttaccctctaagccacctcgccagccccagcttttgttgtctgtgtgtttacatgctatgcctcagatgagtctgtctgttcattttaggagaggggtgggaagtcgcagtgctgaagctcttgttcagcatccatcaagacctgggctcaagtcttagcacagagagagatggggaaaggagagggagagaggtttatatgctaccggatattctgcaggtgtgctctgtgaccacatagaaaggacaaggctcaccggtcactgtctgccatgcctctgggacctggtatttgatcctcagtttggtctagtctaaaactcctatagctcacacaaccaccattgccaagtatcatagttagggtttcaattgctgtgataaaataccatgaccaaaatcaacctggggaagaaagggtttacttacttcctcatggaggcaggagctgatgcagaggccatgtaggaatgccacttactggctttcccctcatggcttgctcagcttgctttcatatagcacataggaccaccagcccaggggtagcaccacccacaataaataggctttgccttcccacatcaaccatcaaacaaaaaaagtgtatcactggctggagagatggctcagcagtttaaaacactggctgcccttccagaggacctgggttcaattcccagcgcccacatggcagctcccaactgtctgtaactccagttctagaggatctggcaccctcacacagttatgcatgcaggcaaaaatcagtatacataaaaataaacaaattttaaaagaaaagaaaatgtatcccaggcttgcacacaggccaatctactgagggcgttttctcaattgaggtttggtcttacaaaatgactctagtttgtagccagttggcataaaactagccagcacacaaactgagaccatacacacagtgcctaggagccaggtggcagtaaatgcacacagttgtcacctgtgtacatttgaactaacactggtcactaatatttgccctcttgtctatgtctcactcttcagttagataataaacatcttcaagtctagggatgtgacttcaagtaagagttctcaagcttacctatctgaatttcaggggagcaactctgatggcagctggtggggccttatccctaactcctgactctccaaaggttcccgtcttaggctcccatcttggtcttgtgttgcttgtgggtatcagggattgaaaccaggatctcaggcttgtgaaacagggctcaaccaccaagctgtattccctaccctgttatcgacaacaatgtttgctcaaaaactagaggggaacatttcaaatgtattagaatagagtatgtaaaggcagcaggggtggtaagcaaagtcttctcactgtagaggctgagtggaaagggctaagccctgaaggggaaggtgccctagggtccattagctgctctcctctactaactgatctggggtctctctagaagaaagtaacttgacaggaagaagaaagattaggccaacttagatgccctgattttaaaactcctgtgtttttctgaaaacctcgaacaccctcttcctagtctttatttcctctgttactttcaacaagaagtgccatttgtgagaatggaagcttttgacacaatttggtcccatacaaatgacgttcatagaatttcattctgtaggcggaaggcttgaaaccctccagccccacccatttactttcatagatgaggtcaggggcaagtaaggctgggttacaaataccttgtttgtatttgtattcaactgtgagattcacagtgtctttgctatacattgccctttatgctcccaaactgagtgggggggggcaggaggtatcttccatacaccacagttatacattgatctcattaactaatttattgggtgggggacaggttcatacaggccacggtgcacatcacactacattttaaagcaaaacgatagcttcccttctacttaacttatttcttactatttttaagggcaaatgaaacaaaggaaaatctcaaagattatcatcacacccccaattcttgaaggcagcggtgacattctgttccttgctgcttgccctttggcttcccataaatggccacaggaaaaaaaattaaaacccctacaccagtgaacagaggggccatcactgctttgactaccatttgacacctcttagccagagcgggagtgttgcatactgtttttgaacctgcattggagtctcctggcccccgctgaaagccaggtgtttatatgaagccacagaatggtctttctttactaaagtcagcgtgccaacaagaaagtccagggcttcagcttcaggaaggatgggaggccagagcattccccctgttcatttaatgtgaatctaggacaattacagaagcaccctgagcctcaagttccttctcccatcccaccattctcctctagtccccagcgtgtaagggtcatttagctgatgagtgcaagccctctgtacatagtaggtcctggagagatgctgacaccagcttgtccagttcctcttgcctgtttcagagttgcataccaggtactgacgtcggcagggtgggtagagactggctgcaaaacttcattttgctaatacttgcttagcgattgcttttgctgatgacacatctcataataaatgtcagaaaagatagtcttaccccagaaccctcatatttcagaaccactcactatttctaaatattttcataaaaaataaatctagtattttgcttacccatttggtcttggcttcctgggtctagactcaaggaactctgtctcctcctccatctcctgtggagggatcctgtttttctgagagagctgtggtgaaagcatttcccattcattgtcgtgggtggcagcctgtgttggaactgcatctagaccagcttgccctcgtctcttgctcttccttgattggctgttcaaatcagtgacttcctccagtgctaaggagtctagaggcttatttcctcccagaatctgggactgaggacccttgtccaagctgagactcaagaactgctccacagttttgtcaggagacccaagtccagtgtcccttgtctctgaggatggatcaccatcctcattgtggcccaagaccatccaactctgctcttgctcagggttttcaggcgatgttctcctgttgtggtcggaagacattctctctttaacttcatttgctttgacttcatttaaagactcaggctggcatgtgtctgggagccctgctaactgagtatctggtagctctgtttcttgggagcctgtggagaattgttctaattcaggtaagttttctcttgcttcccatgcctctggtttcaacagtgaatctttttcatggcttacaagtatgtaatccacggctaatgcatgatggtcttcacttttctctgtccatttatcttcatcgtattctaattttgtctgctcgggcccgtttgtgggaattactttctcttcttctaactctagcatctccttgctgacacctagaatatgaacatgagaaggagagaatggaattaattaacacatcatgtgattggtgttctctgcaaatgatctcttataaaagagacaggctagtgagtattttcattttggggacctgttcaattttctcatgcacaggaaagtttcataatatagtcattacatttacatatactgaagatagttagacaatggattggacatacagttactttctctgcctgtctgggtagcaatattttaacaaatgcactaatttaattaatgctgattccttgaggaatgagatggggggagcggctgcatagctcaccgtttggtagtctcatgtcgccacctgctggtgaatccggattatcagtttctatttcccagtcaatgtttgatggagatgaatctaagttggaacccgttcctcctacaggtgatgaaagagcctcagggtctccatgaatatgcaacacagtcatagtctggtgtctaggctgtctgctgctggtctcggtgtggttttcctctctttgatcaggaagagcagaaagcagcatctctgctgcatcactccccagagatgtatcatctggggacccagcttcctgtgctgtttcagcagcagcagcaggttctgtgaggtaggacaaatcaaaggggggtgtgtatggcgtgagcgattgcttcagcgtaccttcctccaactgaagatcaccgccgtagcggaagtgttcaggctctttcatcaagtcttcatcaatattctggcccatcgcatcatattcaaaatcaccccaggaagcttcagatgaacagacatcttgcttccctgcatccccatcaactggcgtttcaggatggccttctgatagtgttaacttactcatatcgtctatagtgcctgtggaagtgttgaggcccgaggcatcactgaaactgtggtcaaaggcagcttcactcacatccaggcaggtgtcggaggctagcaagatgtcagtaagaacagcagggttctcagaagcaaatggttgctcacagtcaagcaaggctccagtgcctgtctgactttcgggaaaaaggtcttcagatacccaagagccgttgccttctatactgacctcttgatgagttacaggtgtgtcagtgtctacactaccagcgcctgcgatcatcccagcctctgcttccacttgtgggtcagtgtctttctctaatgctgttaagcttgtattgttgtctctgtgcatatcagaaggctctggggaactttctggagaggcaggcatagatgagccatttatatccttctgaatgttgattggaggcagtggtattgcctgtgggagagattccatcccaggtccctgagtaagttcatcatcgttcatctttggctcagtgaggtcaagctcactgggctccacttcaggtcccaggtaaacacctgtatgcttctccatctcttgtgttccttcagaatcatggcatacatcagggctgctggaggcctgagagttgctgtcatggtcacagtgagtcagtatatcaggattctcagtgtcatctttgaaagtgaaaggttgtttgacatccacccataaatcaggtgaagctgaggccaagggcccaccctcttggaagttgccatgtaaaatatctggaacaaaattatgcttgcgttcactggggctggggctatcccattcagaacctgacttatttatcagctgtgtgggggcattgacttcagggagattttctgtgacagggcttgaatatgtcacttggctgagataggatttttcttgtttccaccagttctcttgttggcactcagtgggtgaaagcccagggctgacatatccattttcatatctgttagtaaatactgggtctggatggtcccagtcagatagcatagactcctgacactgctcttgagtgcaagcttctgcaaaaaggtcaccagcagcagagggcatggctgtttgctgtccagaatccttatctttaatttggttcaatattacgagctgactgaattgatcggcctctgagtctaactgctttggttgaatgttccagagtttctcatatgacttgtcaccattgctgtctagaaagggtgacttcagtttaccactgaaagggctagtattgcctgtgtccacaggttcactgtcactctgagtgggtgtgccccagggacctgaattctggaaaactggagaagttgcctctggagaagttgcctctaactcaccctctgagatagacaacacctctgcagatacactggcgtttggtttcccttcctgtagaggggtgttccaccactcactgctgtcagttgagaagccaagcatttctaattgagcagggtctccatcctggggctcagttctgggagttaccggccatatgttgtctcccattttccctgtttctgcagctttggtctccatagatgtgtcctgtgtgtcagtctgcatgagtggtgacaaaatccactgaccagggctgctttgttgactgtcacagaatgggtttggcttgctctctttctccattggctctgaactacccacaaagacagaaaacttggactgggcatcctctgtggtcaagaacgtgggttcgtgcaatgaatcataagccccaggttcactctgagaaacttcacatgtggccaaatggggcctcttctccatcaactcttcatcacctccactgtcatcatcagagcctgagcttgtatcctctatcctagtatcctctggctgcacaatttccacaagttcattttcctcttgacagctaatcattacattgccttcttgatatgcatgagaatattctgaatatttatctgtcccaaggctggatgaagatgatgaggagtcaccattgattgaatcacttggaatctcaggaaatttaggatccttgtgatcaaacatctttccaaatccatcctttctgttttttgcaaagtccctcatttcagtaattacttctacttgggattcagtgggaaatagttctggttcttggtgagtctgtttgctcctgtcatcttggtcctcttcttgaagttcagtactgggtccatgggtccaggacaaagcaactgaagaattatttaggtcaggacttgacatacttgaatgagtacacccactggagaggctgtctctatcataatttcctggtgaaagggcttctgggactttgttctcagtgccctgacctgcagggtccgtagctgcctcataacttatgtgactatcccacacatcactatctatagggccatcccaagcatgaaagttttgaggagattcataaagtagcctttcattagctctttctggctctaggagattatggtcttcagttttctcaagttccatttcagacaaaggcatattttttattagattaatcccattgacagttgcgatggtttcatctgaatttccgtgatccatgagagattcttcattggtttgttttgtctgaaaattacttgtgggtacctctgtttgtgcagcaaaggcatctagagcataagactccttcccaacttctaaggcttcctttggtgcctcagtctgaggactgggggtgactgaaagagggttgattttgcctgatgcactgcagatttctgggtgttcaaatgcagctgaaaaagatagttcctggtcactgggctctttcccagaagcccacaaggtaccatccagcccagaggctatcgctgagtccttgatgagatgaccattgacagatcctgccaggccttcaatctcattttcactctgtctgtaagtatggcctgtccacggatctgactgtgaaacctgttctagactctccagcttggtcaccaaggatgctgtgccaccctgggactctgtccatgtgtgctggttgtcaggttgagatgtaagcactgctgactcactgagtccagaggcttctaacatgtgactgtccttaccatttaccgagtgcccaggactttcaggagtgctttgttccatatctgtagtattgggtgggcttggtaaactgaatgatggcatatctttatctctcatgacagaatcccaaatactatttgcaattaactgcccacttttctcattcagggcatgatattcactgggaccagtgttccctgtaggctcagcagaggcagagaggtcccagtctacctgatttgcttcctgatgttctgtgccccatggttccagctgcttcactgagaaccgggtttcaggttcagtgtttgcagctatgtaaccttctgcttgaccatcactgatggccacacccccactgcagtcatcccaatccaagtcattgtccatatccgagattgtcgcggtggactgcgtatcctccaaaatcacccggttccatgtatcaaggctgtcaggggctgcctggcgtgagttggtgttgctgtgtagaagggtgagctgcctgtttgcctcattgtatagttgcatcatgcttgggtcatcgtaactggatgggctgctctcccccacatcatcctccatggacgcattctcatcttttgcatgccctgtctcgagtaaatcttgatctgggtgatatgtgtcacttccttcaggcttatcatcttcatgaggtgatgcccacatgtctaggttcccaggaccagaaccaactcgatttctctgaggctgctgtggtgacatggcaagggcctcaaccccttctgcaggaccaccagtgtcttttgcttcaaaaccagtctctttagcaaatggcttgttttccatttctttttcatctccagcatatgtgggtgacgtgtaagagtcagaggtggagtagttggtgtctaagggggatgggacagaatcttctcctaggttggatgcactgtaatcagagcatttatatgacaagaaggaatcttcccaaggagctaatccatctgaccctcttttcctaacactctcctcaaagagattccaagagccttccttttcatataccttccctctggctttagaatctaccaaaccattctggtcttcccctggtagcttagaattgttccatgtctgaccaagatcagaaatgggacttccagatgtcagaatattatccttggaaccattgttcttcttgctccagatttccggagcttcatcttcattgatctgaataagagaattgtccagtaggtcaccattagggaaagaaaatccacttttggccatagcccactcattggggtcctgcacagaaggcggctcagggttagtgggatgaagattccaagcactgtttagagtctctgcactatctttcttattaaatgcaccccaggcccggaagggcactgtcactgcagcgtcaacagcatctgagggctttccccaaggctccggcatcattgttggtgagtgacctgaatgccacaaagcagcgaagtcttctatgaggtggtttgttccttgaggagaggcatctgtcaaatgtggcctctctgtgggcgggtactgacattgcaagctctccttcttctggtcctgggtgtctttgctgcccaattcaggctgatcaaattcagattcccagggatctgactttgggaatccaagactctttggttggaatgcggaatctgaggttctcctctccaagggaccgggcttatgatctttccatgattcagggctctggaagacaggctcttgttcactggagttccatgcatctacaatatttttagagtcaatttccaagccaccccaccagctgctgcaccgtgcacggatctgcggcggccccaggtgccccgtgtcaactgcattttgaactatatcttctggatagagtgggactggctcttcatttgatggtgagatttctataaagctgttcataggtgttggtgggatcctctttgcggtattcttcagcctttgtggggaagaaagctcatctcccacaaaacatgtcaggcttaaatttctttcagagctatctcctgagctttcttgtctctgaataaactcttcatcaaattccacgaggctgtctttcccggtctctgacaaaagtgaactagaggagtaattagacatgccgatccccatctcaccaagtcctttaggccccgcggagagatttccttctgacgaatcactgttggggaagtcatcttctggtgagtagtctgcagaatgggatgatggctgggattgctcagaagccatgggtgccgggtcaaagttgaagaggtcaaagtgctcactgtgttccccagaacgtgcatgttcctctgcaaccacaccttctggaatggggctgtaggagtcaaatcctgggagaagactgtggtgaggcccagcaccctctcccactgggctgtcatcactgagaaacactgagctttctttggacgaacgactgctcctgatggtggccaacccactgtcagggctaacaaggtctacgttgacatccacctgagcttggttagaatcattgagctctggggggttttctatgaaattcacagagctgggctgtggctctatgtcagaaccatacaattccataatcccggaagagccctgggataggggggcgctgcctgccacagcttctgttgaggatgtccgactgttagagaccatctctgtgcacctcctattgataacttccttgacaagaagaaccacctggtcacaggtcacagaagggtcctcctgctggtataccaggatctcgtcacagccacattcaaagggctccagttccaggcaagggttctgactttcttccaattcacagcaaatctatgatgaggcacaagggtttgtgtgagcatggagatatcctttacattttgtctttctcaacttttcagtaaaaatttgtatattttcccgtatgtgtactatgtttacttcatttctcacccccattccctatcaaattcattgtcttttttatcattctctctctctctctctctctctctctctctatatatatatatatatatatatatatatataactttctgagtccatttaatgtttctcatataaatatgtttttagggatgaccacttggcactagaaaactaattagggggctcatttctggggaagactgatcatcctggctgttttatgtcaacttgacacaagctagagttacctgaaaggagggaatgtcagttgagaaaaggcctccataagacccaactataaggcattttcttaattagtaattgatggggaagggcccagcctattgtggatggtgccatcccgagctggtggctttgggttctataagagagcagattgagcaagccagtaagcagcactttccatagtctctgcatcagctcctgcctccaggttcctggcctgtttgaattcctgtcctgacttccttcaatggtgaacagtgatgtggaagtgtaagtcaaataaaccctttcctcctcaaatgctttttggccacggtgtttcatcacagcaatagaaaccctagctgggataccgattctccctccctcagcagtcattaattacctatatctcttcttctggggatgggatcttgtgagcccccccccccatgcacattagcattccaactggcggtatgtttgggtcttatttagccaaccacattgttgagatcgcatgggtggagcttccccgttatacaaagaagacaagctcacagcagacattctggccctctggctcttgcagtcttcatacacacacacacacacacacacacacacacacacaattcctcagcattccttaagcctcagtgtagggattgttttgtagatgtatcaattggtaatgggttccccagtcaattgttctatgaagcttgaccagttgtggctttctataatggtctctgtctgttgcaaaaataagtttctttgatgaggggtgagaaccacaattgtcagactggatctgggcacaggatgagcactgtgggtaaggtctggagattggatgtgggctaacatcagaaaagctgatcagaattgccaccaaagaaaaggtgcccaaaagcccagttctgcattcttggaggctgcaacagctcctcccctgaattgccagtagcccaagaccccacctaaagtagtcagcttttgaccatattagggcacaaacacagcttgcaggggacatgtcatcacccctcacctaaagagtacataagcaccctactctagttcaggtacaggacttctactgcctctttgcctgcttcaatccatgggggctaggcagcccacccaagctttgttgataaggcaacgaaaaccactgaaggattaataagtcagcaattgtctgctagtgtgatgggacctgagttttgaactctgcaattgtgctgcagaggtggactcttcactgcaaccacaagataaagaaggagcccttggtgcagagcctgctccctctgtgttgtgaagtatttagaggaactgcctttggagcctgccactggggtgaggagagaaggggaagtggactccagggcttttttttttttttttaaaaaaaaaaaacacttaaagaagcttacttttaaattggtttgcaaaagaggtctgctgccaaaagtgatttgaagattatgacggcagacccttggacaacttaacttatgtcttgtctctaggaagttagttagttagcactaccttctcttattatttggtcccccatgggctcatgcattcgaatccctcctccccagctgctgctatggggaagctatggaacttttgagacatgggtcctagctggtggacacccaaggcctgtagggtcagccttggaggttgcaggaaagcccggcttatctggtcacatgcttcctgagctgtcatagtgtgatagccatgccacaagctcccacttgccatagctgccagctgccatgccgtctctgccatgatggacggtatcgctgaaatatgagtcaaaagaaatctcttccccatttagttgcttctaccaggtgttctgtcatggtgacaagagaagtaactagtgcacccttggatccagatgcatagtgcattagcactgaaaaagccacagcggtgacttgacacacacacagatacacgggtcagagcaggggatacaaaatgcaccagtggagagggcatcatgcaaatacaaaatgactggtggcaggggcatcgtgttcttatctgaacttgagaaagcagagtcagagagtagatacagtcgtgtggacatggaggagccaaatgaagctttaaaggacagagggaagatgcagaaagaaaagacatggagactttgcctcttgtcacctgtgatagccaagggctcttgactctctggtgaggttcatatgaaccaatcattatatccatatctatttctacctaaatgttagttattaagtataaaaaactaactcgcttatatacctgttgtgattaactttcttcttctcctcatccacctcctctctctccccctcctctttttattttctaggctttgtgttaaaaggtccaactatcaccctacaagagccaactgattacctagtgggaatctgagcacattgtgtttgctaaggcatcagatcacttgttctaaatactgggcaccacgtggggactgagacggtgactaggtgagttatcatcagggaatggtttcaaaagaaaatggtatgaaaaggagtcgcctttatttggatgggaaagagatgatagttttgtttatgggttcagtctagaagggaactcactgcggggctctgttatggttttgtgttacccccaggtttgtgcatgcaaggcttggctcccaatgtggtgctgacagtactgaagtcgtggaatctttaagaagtggggctagtaggtcatcagatgacaaggccaccacatagcgactgtattaattgtcatgacaatgggcggttaccaagcaggtctaggcttttgctttctggttctctatgtgatgtcatccaccagaaagtccttaccacatcagtgtacaaatcagaggcatgctcttgaatctctagaagtgtgagccaatttaatctctcttatctataaagtacctggcctctggtactttgtcagcaacacaagatgaactaacagcctttccaaaatgagtcaatctgcaacataccccaatttctcctacaagtccaatctcatgactctctctcttgggcctgtttcttatgagacaccagtccattatcatctcttaccacatgtccttaattccagaaccacaagcagtgaaccagacagaagaagactcacctggctgcacagttccaggttctgggagtacacagcaatttgctgtctctgctgctcctctgccgtgtagctcgcaatcaggatgaggacgtcaaaaccgaacttgtctgtgaaggctttcaaatcactggtgatgttgctgtgaaacagacagtcctgaaacaacagacatatgacatcagtgccaaactgcctgcttcgcccatcatctcaggtctgtgatgtcttaggacagatatttatcatcagaggcaagtaacataaacgatttgggaaattttagaaacgtccatttttggcttaaaatacactttactgatttgttttcccaaaacaagaaaagaagatgtctctgccattattatcaacgcaactctatagtcaaagaacacatctttatgcagtatttatcaagcatttgaaaagcaaatctagctctcaccatttataatactcatataagaatttctgttgactctaatctcaacctgtcactagaaaagcaacaagagtcatataccagggggttgtgtgattgtgtctcttctctcaagaaatactgggaagtccatatttgtctccttgtcttcatacatgatgtattctggtatactactgtcctataatattgttttctttttttggtgtcctaccaaaaacatttgaatgagaattttcccatagactcagatatttgcccaatttgttcccggttggtggtgccattgtggaagtttaggaggtatagccttgctgagaaagggaggcaggccatgccctactttgaatttgctctctctgctttgtgcttgcagtaaaggatgtgatctctcagcttcctgctccttcagccatgtgtcctcatcacagtgaacttttatccctctggaaccataagcccaaacaaactccttcttctataggttgcatggtcatggtattttaccacagcaacagaagtaattaatacagcatcatagattgtgtgtgtgtgtgtgtgtgtgtgtgtgtgtgtgtagatgtcagaggacaacttttgggagtcagttcttccttccttgctgggcaggtctttcttgtttctgttgctgttctgaatactctgggattacagatgtgtgccattgcatctggatcttttgtgtgggttctggagattgaacacaggcttgtgcttcaagtactcttatctgactacttctctggccctacaattttattttctacaattattgttagtttccctccaatagtcccaaagatgtatttttgatgaattggctgaggaattcagttttgagacaaggtctcctggatgtggagctgtggtgttaaacccaggattttgtgcatactagcagagcaatctaccaactgggctgtagctccagcccccggggaaattttattgcaggatagaagtccaggagacttttgtaacagctgtagtgttgcagctatattgctatatatggcaactgtggagaaagcagtaactgcagtgtccccaaaatgtggctcacatcacctacagagcatgcattgacttttcaagttatatcaatttcagtgagaccagtttgcccttataattctctctctttcttcaagaagcacaatgaagcccatattataacccctggcattcacatctggcatatactagttgctcaagaaatatttgttaaaccactggagagaaataaaatcagtttgtgctatacctcctctgtcatagaacacacacacacacacacacacacacatgcatgcgcacgtgcacgcatacatgcacgcatgtacaactagtcactgtatcaatgagttctacacctgtgtattcaaaggacagttgatcatatcacatatgtttggagaaaatttatgtctattgaacacatacagactttgttcttgttatccttccctaaacaacacaaccactatctacatgttttaggtataagtcccctggagttgacttagagaatgcagaaggatgtacatgggttagacataaattcaatgctactttaagaagatacttcaatatctatagatttgggtatcatgctatcagtgagaaacatcaagatgtacactcaagggatttagagatttctaagcattttgttacatagtaattgtaattatgcttattgtggtacaatattaaaaccttatggaagtgtttaccatagaaaatgtgattgccacactgccttctcataatcattgtgaacagccaaatgggtacaaatagttatagatctgttaccacattaatatttgcataatgtagctgcttaagactacttaccagccagtaaaattaccattgaaagcacaggcactgcaattttgctcagtggaatcctaagatctatgaacccctagagagactcttggtgtgtggggtttccatgtgttgctaaggtggggctgtatgtttgttttgttttttgacacagggtctctcttcatagccctgctgtcttggaattcattaggtagaccaggctggccttgaactaacagagctctacctatctctgcttcctgaatgctgggactaaaggtgtgagccaccatgcctggcttctcatggcagctatgcttgttagggattttactagatcactgtctcttttaggttagaaagaagtacacacaagaatcacaaggacctcaggatgcattactgatggaaacagaggacttattatctgacttggtagtgaagtttgtgatgttcacataggagaaccttggaagcatgtgacccagaaaagaccctgcctgcaccatgcttttaatctggtgtctggatgccatggcagcaactactaagtagatattgaagaatgagttcacctacaggagtttagagtatgccttctttgaatcagatcatctctcatgcagaataagcattcactaggtaagatacctcaaagcatcattgatgattagtcaagatacttgatgttggcctttgttccactatggatggaaagcagagctgatcctgaaagcaaacaggaaagacactttcctacagcttatcatcaataactgaagactttgtaggaagcctcataacttccctttccaaatattttaaagtacatgactcgccccccccaacacagtcataaactcctacaaggaaggcacaccttctgaagacatttttttacacacatcagtgatcactccccttacatcacttaaacaagaacaggttaactctctcagcctagatacaccagggagggcctaggtcctgccccaaatgatgtgacagactttgatgatcctccatgggaggcctcacactccctgaggagtggataggggtagaatggagggttggtggggggaatgaaaggactggagggagaaggaactgtgattggtatgtaaaataagagtttttaatttaaataaaatttaaaaaaagaacaggttagcctgactttacatgagcacattacgattcaaagctgtacttgtgggcattcttttagtcaagaatgctagctacatcagaagctgtatggactcttctgtgctacacagtcccctctagcatcctgtctagtagcactggcactgcctccacccacaccccagacttactgaagctggatccgcctttgcatcccacctataaagctctgcatcagcaagggattggtccatatgttttccagcaaactagtccttagcactcagggctctcctgggacttagatggataacacttccaactcctaattctttatattgaccttatcacaaaaacaccctgggctgtgcattccaaacactttgcttgggattgttatttagcattttagagatcaagtctaagaatgtgtgtttttatcatgtcccgtaagtaattcttacagtctaggtcttctgggtaagactgcccaatcctcctatgggtgaccccaaaccaaattccatggaattaaaagaagtactgataaaaaattatgtgagccattttggcatactgtcaaaaccagatacattttacagtaactttaaacaaagatcagcattgatgccccatgtactcggatgaatttgccaagccagatcccatcctactggcttaaagatagagtcaagagtttcatatttaaaatagccaaacaagggaatgagtgagaatcttctggaatctgggaggcacagtctgtttgttctgcttttatgctggtgttgtttgcatagcatataatttattattgtcttctagctatgcagggagtcatgtgctgcagtggcttttacgttgctgacgagcgatgctggccctgagtaaacagctcttcatcatcagctcagccccactgtagacacaggttggcattttagttcccccatctgccttctacctgataaattactgttttagttacacgtacacaaatacgatttgttaacctgctcagatgtctgcaaaatgcttcttccactttcagttaaattacatacacatatgtgtttcccacttagttagaaaataaagggatacttcttgctataaatttaccattcaaccccaggcattgacaccctctacatttctgaacctcactggaatttaggaatttacttatcattgggaactggccagccaaatcaggaaaagtggcaattgcttctcagcagagtccaggtcccaaagattcaaccatcaaacatttagaacactgtgaatctgtttgcctgaataatccacagccttggaattagaaaaatctagaaaagtagggagcaaaaaaaggttattattttccaggcaaaagctattgtagagatctgaagatcactacaatagcttgatgatagtatagacgatgacaaggatggcaacccagggtggagaagcagttatgacctaatagaagactcgagatcatgagagtctggtagatttaatgtatttgttgttggaaatgcagtcaaatgcaggaaatttaggaaattccattgccctaaaatgccattttactttttgctgcattacttcaaaaaatgcagtatcatgtgctggagccatgtgttgctcttgcagaaaacttgggttcagttctcagcatgcacatggtggttcacaaccattcataacctcagtgcccgacagtctggcaccctcttctgaccttctcaggcaccaagcatgtacctggtgcacggatgtaaaagcaggcaaaaacactcgtacataaaatacaatgaataaatctaatataaaaatgtacttagcaataaagccaacaaccctccacagagagagaaagggagtggcgagaggtggcacaaatttttctttaaaaattccatgttggagctaaatgctggcagcaccatgtgtcacaccaagtgaactcagtgtaagaaatgtcttaagagcacctagtggttacaggtgggcatttctggagagagaaacagcaccacccagtactctcttacctcaagtgtgttcttcagctaccttgattggtactgagacccatctttctgctcaaactgctcttctccagaattctaatcactccatgttgcccaatcaaacatgtccctgtgcttaccccattgggctttacctccgacaaagctgacccctattcttttcaaagtgcttcacttttctgacattataccttctgagttcttctcctctcagttactagacacaccttggtcatctttgcttattgtgcttcctttttatgctgctaagtgctcactgccccagatacaccatgtcccccaactccttgctacccactctccttggcattcttattcagagacacatccatggctttacaactcctgctttccaatgaataaatatatccacctggaatgtctggccagcctcacagatagaagttgacctgagcaagttccgcccagctccttcgtattattaaatgaccctaccatccacagttactcaagaaaaatagcttggaattattctggcatttttttctttcctctttcacatctcacagagtccatcagcaaatcctgttaactttatcctaaaacacatatcaggtcaaactctttttcttcatttccatggcagtcttacgacatagccaccatatcaaatctttctctgtactctgtttcttttttatttttaattctctgtgtgttcatgttcatgcatgcatgcacacatgtgtatgtctgtttgcatgtatatgatcatgagtgtgggttccacagaggccagaggtgttggatccccctgaagctagagctccaggtggttgtgaatcagcagatgtgggtgctggaattcagactcagatcttctggaaaatagtatgttctcttaagcagaaatcatctctccagccccagccaccatcatctcttgcccaaacatcccaggtagtatactaagctctttactctccctctgctcagttcacacagcatcaacaatagctcagaggttaagagcgctggctgttcttccagaggtcccgagttcaattcccagcaaccacttagtggcttacaaccatctataatgagatctagtgtgctcttctggcatgcaggcatacatgcagacagaatactatatacgtaattaataaaatttaaaaaaatgtaaatcagaccccaaaagatgagtcagtacataaaagcatttgccaatttgagtttatggctgggtagaaggaaagaaagacaagttgtcctctacaggggtgcacacacacacacacacacacacacacacacacacacacgcacacacacacacacacacacacacacacacacacacacacaccgtaagtaaataaataactaacaatttaaagatatgttgggagccaaatctcagaggttggcatgagatcctaggccatgcttagcaggccaaatagttaacctttatatacagctccttagaacctcagctcaagaaaagaaacaacttcacccagtccaccacccacaggctcagtcacctaagcaatccttcctgaacctcttactcataaactctttaccctgccaaacatcctctttgtggcttcctaatatcctgcctataccaacacctcattttgcccctccccatatcctcactatataagctagcctgagagaaaagtaaagtttgccacttgatcagaatcctgtcttgtggttgttctttctgtgtctcttgtccccattccctatccctgactctcttgccccaggttgatgtcctgcaggtcgggacaaagatataaataaaataatagcactttactatttcaaacccactgattcccaatacaatgtttgttatttgccattactttattttctttaattgaaaggtgaaatatttagtatccttgagtataagagtttaaataaatcaattagaattagatattacagtagaaaaacagaaagcataaaagacaacttgcaactgaaatgcagatagctaataaatatttgaactcattaatcagaaaaaattttaatagtaaaatatttacccttttttctgtcactggtaaatatttccaaatgagcaccacatatgaatttcaacaacagagcataaagaaagaattggcatgcatacaatgtttgtagactaaagtatgcatgggcttattaccttaatagctaatactcagagagaaaatctgtagggccaacaactgagcaattgtcagtaaattttgcaacagtcatacaatgaatattataatactatttaaaaaatcagagagtaacccaagaaaatgtttaaaacagtgccatctaattctattgtataaacttgaaagatattttgtaataaaatttggtattctttgttataaaatctcccatgtggtgctggtgaaatgtctcagtaggctaaggcaattttaccaagcctgatgagagtttgatccgtgggacccatatgatggaaggagaggagctgactcatgcatgttgtcctctgacctccacaggcaccgcatggcacacttccctgctcccccatcatttgcaataatattaagacacactgatattaagttgtcactagcagccaaactgttgatctgaatacctttgcatttctctattttaaagtatgccctctaaagctttctagtaaagcctttggcatcagttaggtgtcttggctctgatactttcaatgtaggtgagtgtccctctacctctgagctctggtttcctcagttattagtccctacctccaagttgtactataagaaccaagatgacattagaaaagctatcctggtgccttggacacagcatcagtgaataagttccttttccctccatggtcacttaactgtcgagaggccactctcagggttttgggaatccacccaatgacagaaagcattttgtgagagtctgtacatggggacttcttgtttgcatggattctttcctttatatctttcatactgcttgaactttctaatgatgagcacgcacgctaatttctaagtctcttaaatgacatacacagaaaatcttatgtcagatgatgaagcggcagtcaagtgtgaggaaagcatgcttttaaaacacatgatactttggaaatcagtatggcggttgctcaggaaaatgggaatcagtctaccacaagatccagcaattccactcttaggcatatacccaaaagaagcacattcatacaacaaggatatctgctcaacaatgttcatagcagcactatttgtaatagccagaacctggaagcagcctagatgcccctcaactgaagaatggatagaaaaaatgggtacatttacacaatggtttactactcagtggaaaaaaaacaatggaatcttgaaatttgcaggaaaacggatggaactagaagaaaccattctgatcctggtaacccaatcacaaaaagacaaacctgatttgtactcactcatatgtgtattttagacatagagtaaaggattaccagtctacaatccacactgccagagaagctaataaacaaggaggaccttaagagagtcatacatggtcccctggagaagaggaaagggtcaagatcccctgagcaaattgagagcacgggaagaggggggagggagctaggagaatgagaaggggagaagaggagggatgcagaggacatgagggagcagaaatgttgattcaggagaagaatagaagaaaacaagaatggagataccataattgagggagacattttaggtttacagagaaatcaggcactagggaaatgtctggagatcaacaaagatgataccagctaacaatctaagcaacagaggagaggttaccttaaatgccctcccctgataatgagattgatgactgacttatatgccacccgatagccctcatccagcagctggtggaagtagaagcagacacccacaacttatcactgaactgaactggaatccagatgcagagaaggacgagtgaagagcaaagggatccagaccaggctggtgaaacccacagaaacagctgacctgaacatcggggaactcttgctccccagtctgatagctgggataccagcatgggactgatccagaccccaagaacatggatttcattgaggaaacctcggaaatctacaggacctcctgtagtagttcagtacttaaccctagcataggtgtggactttgggagcccattccacatagagaatactccctgagccaagacacatgggggtgggcctaggccctatcccaaaggatatgatagactctgatgacaccctatggaaggcctcaccatccagggggcacagaaaggatatgtgataggtagggttttagttgggggggtggtagggagaacgggagggagaagggaactgggattgtcatataaaacaatcttgtttctaattcaaatacaaaatctgcaaaaattataaataaaacacatgatatacacttgtcagaatggccaagatcaaaaacgctgatgaaagcttatgctggagaggatgcaaagtaacggaaacatacctcattgcagtgcaaatacacacttgtacagccactttggaaataaatatggtggtttctcagaaaattggaaatcaacctacctcaaggcccagcaatactactcttgggcatataccaaaaggaggcacattcatattacaaggacatttgctcaactgtgttcatagaagcattatttgtaacaacctagatgcccctcaactgaagaatggataaagagaatttacacaatggagtattagtggtaaaacataaacaaaaccaaaacaataacatcttgaaatttacaggcaactggatgatggatctaggaaaacaaacatcctgagtgaggtaacacagacccagaacacttactcataagtggatattagacgtaaagcaaaagataaccaggctacaatccacagccccagagaagctagctaaaaaggagaaccctaagagggacatgcaaggagggccccaggaaggggaaatagttaagatctcttgggtaaactgggaggcgggtagaagggaggggatgggaacatgagggataatgatggccaacttgggggaggggctgggagggagaacaacgaaagaaatagagggagccattatgcggttagggagaaatccggttgctatggaaactcctaggaatccacaaggatgaccccagctaagactcctagcaatagtggtgagggtgcttgaactggctttctcctgcaatcagattagtgaccaccctaacccccatcgtagaatctacattcggttactgatggaaaaagatgcagtgatccacagccaagcattgggctggagttcagttggagggaggagagatcatatgagcaaggggggtgggggcatcaagatcatgatggggaaaccacagagacagctgacccaagctagaggtagctcatgaactctggactgacacctggggaacccgcatgggaacaaattggggcccctgaatgtgggtgacagttataggacttgattctctctctctctctctctctctctctctctctctctctctctctgtgtgtgtgtgtgtgtgtgtgtgtgtgtgtgtgtgtgtgtgtgtgtgtagctgtcagtgggacccagatttaaccaggatgcatggactggcttcttggagcacatgacctatggtgggatagcttgcccagcctgattcggggagtgaggggagggccttggtcctgcctcaacttggtatcccagactttggtgactccccaagggaggcctcatcccccatgaggagtagatggagggtaggatgggggaagtggggagggaggcagaactggggttggaatgtaaaaataatgaaaaaactttttaaaaattaaagataaaacatgatataaaatgttaaacctggggtaaggcagtatttatctcagtaatgggttctacatcctttgctcctggaagacctactgagcttctgcatgccactctgcagcaaccatgaaaaagcacaaagagaaacgggaagtaccttttcattcctttggtcaaggtaccacagacagagcctccttcatcattcccatcattcccttaccagtacctaatggcctttgagctttaactcttgatgctagctgttgcacccaggcccagcattctggactacacaccaaatccaaagcagttgcctggctctcacatcaacatgaactagacagactaaggctgttattaaatggaatgttgcaatatgactgacaaggtgttcccagacttgttacatctgtattattttcttcgggcaggaaatgggaacatcaagtaagcagctatcatttgtggggagaatgcttgtggataaaagccattgccgagattaaaaccttgttccgctgcattttgaacagagtcttcaaaacagagactgacagtcctaaccctgcaagcacagcgggtagcacagattgctgagttactgaaatctcagagtctagcttgacatttagactccgcatggatttatttctcagaccaagggccattttcctgtttaatcaagatataagaaaaatgctgaggtgtgggtacaaatgttctaaatgaaagcttcatgatttatgctaccaaatttctatgatgatgtttaaagtattcagcaataataaagtctgataatcttgacagggaaatgatttatgagaacacaaaatgcataaattaaaatttttatttattgttttccatacattctttaattggtaaacaaagaaattttccatacttttcccagacactatttttctatacactattgttcttgtttcttattttcaaaaggtaacccaggcatcttagtagttaaaacacttccctgggtctattaaaattagactggatataatattttcaaaatagagtcagagagagtctattttcgtcctttataattaaaaaatcctttaggaaaacttttgtgatacttaaaaatgcaataatataaattagtgcataggatatatgctatcaatgtgctttattgatccattgatttgttatattgatttacgataatactaattccctaacacaacctaacagcatcacattaaagcatctcgttaactgtgtttcatcaccttccatgagcttcctggtgcactgtgaggccaggattattgtcttatattgggatatggagacttggggagattaagtagttgatgttgcatagcttatacgaaagaaaaatgggattcctattctcactagtctaaattcaaaggtgttatttgaactcccattttatccccaaatgagaatcttcctcatggaagacattactgagaaataacttaataaaagacagtttttctgctgtctttaccactctgtccaagcaagtcatgtccttaaccttgacaacgttgatggtgaaacttgcctttattatcaccttgcttcatgataaactgctagtttctcacccactccactaaatagaaatgtaggatcaagttaattatggactattaattatgtataagagcctaaaattggaaacccaaagaaacttctatgaagaagaatgttgagatgttcttgcagcaacatgcactcccgcccaccccctcacccccacccctagtagaggattaccataagctcctgatctggcttccactttcaagctgtttggctagccgtgtgccatcacgcctggcttctgcggtgctgggtaattgaacccagggtttcctgtgtgttaactaaacactaccaaaggagtgagctcatctatacacagcccagcaacacgtgctgctgggggcggggcgggggcagtagacctggcatgatcactgtcctaaattatcctcatgaagattttcctcttccagtagcttagatagaaacaatgggctaaactcatttcaattgttacctaaacatattcccaacactgcttttgctctaaagcccatgggaaacaagaaagtgggattttgttttgttttgtttcaaagatagggtttttctgtgtagctctggctgtctgggaactctctttgtagagcagctggccttaaattcacagagatctacctggccctgcctcccaagtgctgggattaaaggcatttgagactaccactcagataaggaattgagatttatagaggaagcaagagacaaaaacaggactgccttttgctttagtttttttccctttgactaagtgttcatcttaacaggagaggtctatgaaagcagcatcctcttgttaaggctcagctatcaagacagctactaaagtcagccagatggcaggtgtttcgatttaggtcaggcatatgggagaccatgaagggaaaggctatgtatggtcttccatgcaatgactcttgtaaggccctcgcttggactgaagagttccagaacagtgagggagatcatgtattcaccgagaactgaaaatctctgttttcatgttctgagacatggaggacaggagcagggggtggaggggaagggaagggaggctagaaggaggaagaaaaggacgaggaggggagcaggaaggggacaggaacttgttgggaagataatccacctcaaagctcaggtacatattcagaactttataaaagggatggaactggattctggctaactctgaagtgagttgaggctctgctccatcttcacggtctctagcatacagaggagctgatgttgctgcagtgagaggtgacctggaaacaggtgcttgaaaaatgtacatggaaaatggttcctctgctgactcagacaagtggtcaggaggtgactgaggacttacttcacagcctggtgaagacagcaccgtcatcgctttattaactagctcatcctaatttgctttctctttactgcttcctgtctcttcctcccttcctccttccttcttcctttccttgcttcctcccccccatttcttttttttactagagcaaggcccacatcactcagtctgtcctcaaactcactatatagttgacgatgacagtgaactatagctggatattcctgtctctctctctctctcccaaatgctaggtatacaggcatgcactaccacatccagctaatttacattttcttaaagatgccaccaatggttatccacactttctgctgtagcataccatttaaagacactgaagaaagatacatggctcttcttcaggacctcatgcatgcttacgagggaatagataattcaggaatatatgtaaaagaaaaccacgcatgtgggcatggtggcatatgcctttaatcctagcagccaggagacaaaggcaggaggatctctgagttcaaggccagcttggtttatggatcgagttccaggtcagccagggctccacagagaacccctgtctcaacaaacaaacaaaacaaaaacaacaaaagaaaaccactcactagggatgcttcactgtttgaaatgataggatctggacaacagctgaactactaaataaaaataatagtaatgcattatttccatagctatgttccagatgtaaaaacattccctgttggttgcttttgagccacaaaccctgattttcctggcttttttctcttcataaaaataacgaatgacttggaagatcacttcagtaaggcagaagcccattcttctctgtggattccttgttgtgtcttcctgaagccaccacacagtctccagagggcttccatacatgtgagatgaacacacactcccgatgcagctgagctgtgtcaatattaacctgaccaaatgaagatcacactgtctcttttgttcctcctgctcctcacatggggagcacaatatggctcttgtcagaggtgcttcatcatttgggctcaaggaaactgttagtacagtttgggactcgttcttcatgggcagaaatccggatgggtctaatgaagcctttctgctgacaactcatttgctaaaaatatccaagcatcaccaagcataagggaggaatatgctatgtcccctttgcttacaacccagtgaaagtaattcattatttttgaagcctaaaaaatctacccatcaagacacacacctcttattgcacttcgatatgcttttgctggattccatttgctccctgataaacttggtgccatctctaaattggaaaataatagggtaaacaccaatcttggagcacacacgcagaggcaacagtctgtgtgtgccatttgttgcaatctaagctaattaccagcaaccccctccagaaaacagacccactctgggctttgtggttttacttttcccttggagatgtgtgtatgggggggggactggaggaggccctctttaggagtttcactcacagtgttgtgactcttttggcctcaagtcataggaacttaactatgattggcttaggaaagggataaaaggtttgaggaactttcaaagggaagtcctgggaacactgatggcaagaaagacaagggtgttcaggagtgtgggagccattctgcatcaccagggccaactggcattcttcatgggtttggggccaggggagctccagcaggctagagcagttcttgcatgcctagacagcacctgttccctcttggtcttgagtgtgaaaaccctggtgaaataactctgtttcattttggattggatacctcatctatgaagcctaacaactgtgaactagaaagatggtataccacccacagaaaaggcatcagttacaagtttatgactgagacttactttctggaggcaagcccctccccaaacttcacatttccatctttaaccaaccaacgtagtcatggggagagcacagtgatgcttaagagtatgagttaggggaggtgacttagttcctttgttgtcttgggatatcacgctccatcaaagaagaaattataaagggggtgtgtgataaagcaaacctacaagagtattaagcttagaaaatgaaagtctacttaattaaaaatatgcaatataatctaaaagtaaaagaagctaaaacttgctgatgtcttttcttttcagccagtataagtgagtctcagcagtccctggaatccataggagctcgaatctacgccttagcggtcaaactttcatagttattagtgatggaagatgctaagcaggaagttagagaacaagagccttctgtagccaccaactcccaggcatcatttgaaatatttaaatatcagtatgtcagcttcctccaacacaaacagcatcactggtagtgagagaaatacccacaaggacagagaatacattttcaaagaagactttataaaggcaaatggccaagctgctgcaactctttgtcaagggctagcctttcattgctttaaaactaaaccatcactgacattcagagagtgaccggagttcacaggctgcttgtaactaattgcaaggttaaagatgagcctgcagtgagctgtgaactggcccaaagttaacagaattagaacagaagcttggaggagtaaacacagcttactcatgattgcatcctattgtctcgtaaacatatatgaagccccaggcccccaagaacaagcatagctttctaaatgaataaaccgaatcatagaaatgtcaaatatttctctcttggttggtccaaaaaagtggaatgctgttttcatgactgttagtattcaggcatctgtactggcctgcccttggggttctgacaggacacacctcagctgcagccactaagagcaccacctgagcaatgtgttaagttcccttttaaaagggccctgtccaccacccttctctctctctcttcctctctctcctctctctctctctctctctcctctcccccccccccctctctctctctctctctctctctctctctctctctctctgcttctctgtctctgtctctctgcccccctccattctctctctctgccttttttccccctcttctgctgttcctatccccagagactggtctctcctctctcctcccaccttttcccattccctttcccgtaattaaaacaatgacaattcactgaggagggcaattttgccattcttctggaaaaaaccaagagaacaaaggacctgggcacctattgttttgttttatggtatacatacctcacctgctaaggtttatttttgtttgtttgttttgtttttgttttttcaagacagggtttctctgtagctttggagcctgtcgtggaactcactttgtagaccagagctggcctcaaactcacagagatctgcctgtttctgcctcccaagtgctggtattaaaggtatgtaccaccactgcccatctgccaagatgcatttttaaaagatgtttttaatggaagtagaattatatcactttctccctgcctccagcccttctcagggtaccctcccataaatttcccccatgtcccacctctcaagtgtatacataaatatgtaaatacaacctggtaagtccgtttttgttgtttgtgtgtatgtggttccactatgcactggacaaccactcatactcccagagagaggctaattttccagcaatcataagttacctccagttcttcatctaattcccccctctacgttatcatgtccactgatattcttcctgttcattcttgttagtacagccgtttctagcacagacggtttcatagcagactctctggtattctggctcttacaatctttccaccccctcttttgccatgtttcctgagctacagatgcagggactgtgctgtagatgtatctgtcggggcaagcttctcaccatccattgatttctgtgttgtatccagttgtgtttttctttggtagtctctatttgctgtatgggaggcttctttggtgacatctggtaactacactcatccaggacagctggctcacacataaaaggaatttgactagaactgggctttttttgtgtgtgtttgaagatggtgactggttgggggaagggcctaaagatttatctttatttgtgtgtgttcctggagtccttaggaaatggatagcctggtacgggagccacaggttaccatgaactgcccaacatgggtgctatgaaccaaactcaggtcccctgggtgagcagaaatgactcagttgagttttggggactgaactcagatcctgtgctgacaaacagaaccacctgccaagcccaagcagacattttaaaaagtcaactttatatctaagattcccccaaacctacaagcctatctttaacccctgaaatgtgggtatggcaagaaccaatgtatcttggttctcaggtcttgcaagtgggcagctggcatccttgactggtacctgaggatacatagaaatttagttttgttatttaaaactgtatgcccatatcactagttctcaaccctgaccatgtctcagaatgatccaggaagctgtaaagcaaacaaaacaacaccaacagaatgcaaaaagaagctaagagcccaccccatgaaacttaaaagcaggagtctgtttctcctctattactctcaaggcaggtagggtaaagaacagtaatctataggatacaaagaatcattttcaatgtgcaatgtctagacatggtttctacatttgctgtttttgcttctgtacaaacatgaacatcacacagcatgtaaatacatataaaaaatggtgttgggaattgacagctgagcattcaaatcccggctccatatgctgtgtctttaggcatggttacttgattgtgccaatctgcagcaccttcattgggaaaatgaaataatgacctacttacaaaataaaatgaggtgatgtgtaagtggtcatacacatgcccacttatgcagtactccagagcactgggtgacttttatcttatggatgccagaaggaaccttacactacatgtaatgcctttttttttctttgtagccattgtttaaattatgtaagctacagagtttcttattaaaaaggactctcaggtagagaggaagaatctctgacaaatgaattgcttgaagaactgggctcttctccaggcaccgcccttcctgtgttcttgccaatgacttagctgcaagagaatcatgtgaagtttcctggcctcctctgcagagggtctgagttggtggtccagcatcatcctgtctcgaaagccctggaggtgctgacatgggtctaaagatgacactttatgtagtttgatgaccttcctctctgggcctaaaggttctaatgtgctacagagagcccagaggcagtaaagtctgcagttttattttccttgattctttaaatgctagagttctatagtcaaaggtttctaccgattgcttgttcaggttgacaatagcagtgatgacttggataaacaattgcttaatataagaattgctttttagggactggagagatgtctcagtggttaaaaatgctggttactcttccagagtagctgggattgactcccagaacccacatggaggtcgaaatcatctgtcactccagttccagggggatcaaatggcctcttctgaccttgataggaattggtacacagatacaatgcaggcaaatcgatcatacacataaaattagtgaatcaattaatgacagacttggttggagagagaaatgattttaaaagaaatgtttcataagaaactacaagagaaatttcattcaaactcaaaagtaaaattatgtatccatctatattttcatttaagagcaaaaccttcatgagtatttaggagtacataagagcttctcatgctcttgtagaaatcatacatggaaaatgaagctctcacttctagttacagttcattaatacagggtaagaacggacacagacaaaaccacaatgcagatcacttcttcatgtcaccagccccaccccacttctatatggatactgtcaccatcccaggacacattttcactccaaacaggtatcacttcatttcactgagtctctccaaagcattaatatattccaccagtttactcaaaatcatgtaattatattaactactctgaatagatgcgggagcaaacacagctgatcctaggtaaacattgactttagtcacagggtgttcacacacctgtgctttcttagcccatttccagtgagcttggagcattctgctgaggttatcagtcagcatgctctacagaacagaatggagggtgcacagctcctctgtccattaagggaagagcaacagagctccactatcagaggccaagccccccaaataaggggtttgctttgcaggatatattagcctaaactaactttactatgaaccactggaagatgcctcttacaatgaggattctgattagctcagagggggctgtctgcagctcctcggtgatggccacttgccagtctgacctcatgttgagcaacaatatattagccaacactgttagaagactcacatacacacacacacacaaacccaaacaacaacaaaagccctgaagggtccaagtaattaagagatgatactcataaacacattcccgttgcaaaatgagaaatgcagagagcaccatacacatctgaatattgtacaggatccttattacaaatggaaatcaatattggggcattttgagcctggctgcattttgcagctgcacttatgtttctgggatagtcaaccttttcccacaaatacaatcctgtcactagcaaaagtccagtcttttcggaggtcccaagacatggtttatgacacagagagctgcacgtgaacaaagtacctcccagggaaacagaagcgtctctctccagcatgggctctgtcccaccctcacacatttggatccttttggatgtgagttttgaataatcctatttagttacttttagttggattttgcgtgtgagtgtgtgtgtgttttattaaaaattttcaatacaacttattttgattatgttttctcctcccaaatcctccacatctacctacccatccaacttcatgtttctctctctctctctctctctctctctctctctctctctctctctctctctctctcttttcaaaaaaaaacccattagtttttggtttggtttggtttgcattgccttttgtttactctgagaacaagcacctgctgctgcttttctgtttcttacatggtccccaaacaagtaacttaggcccaattaacttcagaatgtgtggggtccaagttgtgtaattagtttgcgtctgctttgtcctggggattttgacataagaaagcgactcagctccaggagggggcttagagcagcttcttctaagatggactgaatgaggagggatctccagtgaaccttggaccctgagcacagctcatcatttaggaaatccctatgtccatctgtctgcctgcattcatgcctccctgatgttcctccattattcttaagtctttcctcaccttcatcctgacaggtcatcaacagtgccaacatgccaactatatggaaaagcttgcatagatagcatttttcttcctattcaacaggccttggaggggagttggcgagatggctcagcagttaagagcactggctgttctcccagataccctgagttcaattcctagcaaccacatggtggcttgcaactatctacagtgggatctgatgccctctcctggcataaagttgtacatacagatagagtactcagacataaataaacacatcttttttaaaaatggaatcctttggaatacactgatatttaattccaggaatttattttcttaacagaaatgtctggtgggaaatggctcacacatagctgcacaatgagacagtcaacatgggaactacattcttcaatgcagagttgatctctgcccacttaagatgggataggatgaggtcattcttgtccagacagtgacctttctacttggtcctaaatcctgtctatctctttccaggttttatccttcacatggagtgcatggtttgaatgagaaatgccctatagtcttgggcaatttgaccacttggtccccagttagtagtacttggtggggtgggggtttagagtggtggagacttgcaggaagaaacatggtattgggggcaggtttggagattcagagcctctagctatttctagttagtttttctgtctcctgtttgtggttcaagatgtgcattcttggcttctcattccaatcactgcctgctgcttgctgccatgcctctgtgccaccatcatggactctcatccctctagaaataccagccaaattaaattcccttttctttaagtcatctttggtcatggtgttctatcatagcaacagaaaaataactaaaccatggggttacatttaaaaaaatgttttgtgcatttaaagtgtgtgtgtgtgtgtgtgtgtgtgtgtggatggatggatggatggatggatggatggatggatggatggatggctcactgtcttgctctctgtctgtctgtgtctgagagtatatagtgcatgtgcgtgtgcatgcgtctgtagaggggtgaagctgacatccatgtcttcatcttatattttgagacaggtctctctctctctgtctctgtctctgtctctgtctctctttctctctgaacctggagctcactgatcagctagacagcctggtcagtgcccttctccttccccaggacactcctgtctctgtctcctagcactggagtcacaggcaggaactgccatagcctgctttttacttgggtgctggggaccaaagatcaggtccccgcatgcttcttcccatggagattgtctctgcagctgtgtccagaggcaggaatacctgaaagccctggaatcgagtgatagcaagagtagggcattcctctctccctccttcacacagtatgatctgtatgttcggctacccctgaattcttttgtagaaataatgagaactctccctaaggcccctgctccatctactcagctacagtgaaagtattgggctacaaaaaataatcacatgcgttttatgaggctctctcttgccccatggcctagagatctaaggactgaatactcctggagctaccctggcaagtaacagtctctttggaaatgcaggcagcaccaaggaataggtgtgaggtagagaaagcaatcagccctgaccactggtttgagtacaggtcccctagaaactggatgtactttgatatgttgttcccttgaagcagttagagtttaatttctgtcacgtacaaccaaaggacaggagtggcaaccatttcttctgctatgactcgattcccgaacatagcagtagagacaatcacagtgactgcaattacctactagtccaatagacaaccatgcatctccatcccttccacaccattctaggaaaggtccctcatcaagcaaggcatcacttagtacaagagagatttggtaagtaacaaaactgctatttctgctctcaccaagtgcaactgtcaccgacagcagccagggtcttttcacatgttactgtatatcctccttggaaatgtactcattcacaggtttcttgtaagtggaaaggagaaggggctaccttcttgtccttatttaaaggtaagagtctatcagggatatgccagtgatgccaggaatgtcaagctttgggacttggttgcctccagccttttccttgctgagagatgatcactcaaacccatctcagtatcaaagctctggaggcatttgactgttgtactaacatcagtgagaagaaacattcacatacacagctccagggcaatccctaacggtgtggcatgaacaaccacataaaaatattacaggtcccatactcagaaatagctattttagcgacatagcttcaggtgcaaatttacatgcaataactcatattctaccaaataaatcccaggcaaacagtaatgcaaaacatatttcctgctgtcaagaaaatttctggcaaaattaatcaaccattcatccattcaggctctttgcatacccttttgtcaaggagggaatacgaagagatttcttttctcttccacacactcatttcagtgaattgaagaatccatcaagcttgagttgatttattgaactgtctcttagcccagcagtataactacagcaaatgaactgataacttcttttaaaaccagcagtgacttgattcaacaatatctggtttatttaactctttataattccaaatttaacttgttctagaactcctaaaacagcacagatttttggctaaaagtgtgcatcattacacacattgcttgttgttctgatagcattgaaaaacataaatttgagggcttttccatgtaagccagtggttctcaaccttcctaatgctgtgaccctttcataatagttcctcatgctgtggtgactccacaaaattattttcgttgctacttcataactgtaattttgctactgttatggattataatgtagaatttggagacagagctttgccaaaggggtcaaaacccacagattgagagccactgctttaagagatgttaaaggcacattttaattagttagatagatttttaagggatttctctaaacaccacaaccttttttctgatataaactcttctggtggttaaagtttctatcagtaatgaacatctagtcactttagctgaaagaactaaagacagactgcttattttttgtatttattgtgcccattacaccaggtaaagtgatcaccgtatggagagggacttagtgcatgaacactggagataaaccaggcagactgtttaaacacactctctacacagagctggtccactgagcccccagagcccatttatcacataccagctttgcgtttttcattgtaaagatgtacgacctttgcctattagatttcattaacggggcaccatacaaggctcctttgcacatggcaggctagagagcgcaacatcctcgcctgaaggactttcgggaagagctcatcttcaatctttgtccctgggaggcacttttaacacctgccaaccacagcactatcatcagaaaaacatttagagatttatcttcgggctggtaattataagagataatttgtttggagtatggatcaagttggtctagcataaacaaactagaggctcaaattacatgatgaacatcattaactattgatttaaccactgcaggtctgtaagctcccggacattctgaagatggtgggttcctgaaatcgcacctccagcacaaactttcctaagagtcaagaaatgatttcagggtgtgctcaaactcatcatggttgacactgttttctgtctttggaggatgcacttttctccagagctctgaattttcagaatggtaggaagttgaaaatgaaagaagatttggacacagaaatgatacagaaagtaggggcatttcctgaacctagagcagaggagggaatggtagcaactgctagtaagttcttggggaacttgtcagagttgatgaaaaatggactataacagtggccatgtctgcatgtctgtaagtttattaaaattattgaattgtattattccaaggaatgcattgtatagcataggattgtgttttagtaaagttgctatttaaaaaaaaaaaaacactgcagactgtcaaatacttttgtaagtgaagatacttggggaagacttttagaggtgtggagtcaacaatgtcacatgccacacaccattctacctttctttctcccgggaagcctttggaagatgttaatctcactggagcctcagtcattctgtgcagtgggctaggctgtgcttggaccactttctgtattcttgatgctggaatggatcctgaggtctttctttgctgtgctcagcaagctttccatgactgaactgcctacccagacctcagcctcattttaaaagacagccaagtggcatcatggattcttttgtatctgttactattctcatcctgtttgcacatggaacaccacgttggggaaataaaacagcatgcagaaggaaaagaatgggcatgggcaagcatagtggatatgcaagccatggtggagggcagagcagaactggtttggatcccagctgcatccgtacagctctgtctctaagcagttatgtggctcactgtgaagaattacagcctccagctctcagtgtaaagtatcgcctatacacacagtaagcattcaataaatgacaccactaatgctctttaatgccatcattaatactggttgtaagagaatggaggtagcaagctccattgatccttcccaaatataggtctataatttcttattagaaatctctgaggccagtgatatagagcttgtcatttagaatatttttgtttgagaaaggcaaaatggtgattatattgtaaaccatgtgtcaatcccaccagagcttagggtagcttctctagaccacatggcaccaatataacaaaatgtctaaggagaataaagactaatatttagtcagaatttgatgtcaaaatttccccccaaattttgtaagttttaaagctttttagggttcagaaatgcacataaagaattgtaagtttgagttattcctcaataaaatgttaaatattaaatgctcatagcttattaagaagagcagggctgtttctggttacatgtttagataagtatagaaccggccattgaaagagagcctggatgaatctttaatgggtcagtttaaagggcaattgcaatcagtcttcttaacatgaattctactaatgaattcaaactgtagcttgtccaaaaattacatttgctctttcggtaaaaacaagtatcggtgcccaaacactgcaaggggaatattttacataatttggtattttagggggagagagagagagagctcagttaagagtgcttgctgtacagtcatgaggacttgagtttagagtttcactgggtatcctacaaacacctgtaagtccagctccaaggcatgaaataccctcttctgtaagcacccacctatctacacacctactcacagagatacatacatacatgtgtgcatgcatgcacataaataaataagtctttaaaaattaaaaacaacccaaaacactttatatttaattcaatactgaattaattaaaagacaaatgtgtacttcattgggaatctctcttaacaaaggatcagggtaaataaccatcaacttctctagttatttgcttaaaggtgtttttgatattgtttaatttactctttttttgtaagtacttgacacaaccactgagctacatacccagtctagtctaagccatttatttattgtgcctgtgtgtacatatgtgcagaagctggaaaggtgctaactctctacctatttctttagagcaggatctctctctctgaacctggaacttgatcttgactagcctagaagtcagcaagccctagtgattctcctgtctctttaaggggttctagtcagcataggatgcccagcttctttttaaaatttttttatttactttttaagttttatcaagatattcttccaattgcttgtaaagagatctgttttttctttctttctttctttctttctttctttctttctttctttcttactttctttctttcctcctcctcctcctcctcctcctcctcctcctcctcctcctcctcctcctcctcctcctcctccttctcctccttcttttttgttgttgcttttcgatacagggtttttctgcattgctttggaggttgtcctggaacttgctctgtagaccaggctggcctcaaattcacagagatccacctgcctctacctcccaatgctgggattaaaggtatgcaccaccaatgcccggctgagatctgttttcttgtaatgaatcttttttttttttcccttgatttttgagacagggtttcatgttgtataccaggttggcctggaactcatgttgtggaccaggatggcctggaactcacagagatccccctgcctctgcctaggatcacaggcatgagccaccaccacccagataacattcagcctcttattcaagtgctcactcaaatctggatcctgttccttgtgattgctcatcaaacacttaaccactgagccatctctctagccctcaatttaagctttacgttttgaaagttaaaactcactcattatatcactttaactggcattaattaacattcatgagtttggaattctggcaaatgaaacaccggctactgacacattagatgtcataacttggtctaagtgccagagcccaggcagggttcagtccccacagaaagagaaaaaagtattcaaagctgatttctcgtcaaaacaatggatatgttacaatcacagaagcttaaaaagtaatcttttcatgtaaatgaaccggaagtcccatgaattataatatgcttgccaactacacacagagcctcgactccagaataatgtatgtattgtgatcatattgttaatacccatataattccatgctccataattctacagatatattgctctctatatacatgtctgtgtttatccgattatgtacacagttaacaactttagttttcttgagggaaggtacttaagtgtgggacaacataataaatatacatcttttatcacttttcttcttaaaacatgtattatttttatgattttaaatatatgatgaagggagatgggagactaatgaaatgaactgagagtgtgtctttgttttgtactgtaaagtgtctgcataatatactcaagtttgtctaagtgcacaaataagcacaagcagttatgagagtaactgaggcgccttcagcaactcatttgttaaacagtcagttccttctgaacaaaatgcaagtcattatctacccaaacaagaaaacagtctgcagatgcatctcctatgccaagtttagaggctgtattattgtaacagtctatgcagttggcaaacacccttgtatgatccaaacaccccaaggtcagaacaatacagggaactaaagcaatggtcatgccatcagggatcattccttctagaacagagggtggccagggaagacctccatcctggggaactgccttagtcttgctggagtgaagaggggcttgaggattgtccagaagaagtttggctgccgtggctggggttgtctgcttctgccttctccccatgcttctctaaaaccccacccatccgtcttgctgcatctctcaccctagttaggtttcactattgctgtgataaaacaccaaccaaaaccagtttggacaggaaagggtttgtttggcttacgggttacaatctatcatggaggaaactcaaggaagaaacctggaggcaggaactgaagcagagaccaagaaggaacacttcttttttttttttttccttttggtttttcaagacagtttctctgtgtagctttggagactgtcctagaactcgctctatagacaagggtggcctcaaactcacagagagccacctgcctttgcctctgaagtgctaggattagaggcatgtgccaccactgcccagctggagaagcacttcttacaggcttgctcagccttctttctttctttctttctttctttctttctttctttctttctttctttctttctttctttctttctttcttctcttcctttccctctttccttctttcttcctttttagttcaaattaggaacaagcttgcttcacatgtcaatcccttctacctctccctcccccaaccccctaccagcctcctaccccatctcccctcggctccccagggtgggtaaggccctcaataggggcccccaaagtctaccacatcatcctgggccaggcctaggccctccttcatgtgtccaggccgagagagcatcccttcatgtgggatgggctctcaaagtcccttcttacaccagggaaaaatactgatccactaccaggggccccctagagtgccaagcctcctcattgacatccacgtgcaggggtctggatcagtcccgtgctggcctcccagacagcagtctggagcccatgtgctcccccttattcaggccagctgtttctgtgggtttcaccagcctagtcccgacctctttgatcttcattcctccctctctgcaactgggttccagagttcagctgagtgtatagctgtgggtgtctgcttctgcttccatcagccactgggtgaggtcaacctgctttcttatacaactcagggccacctggcaaggcgggatataaagagatgatccgtactccatatggttaagataactttattcagataaacaccagccaaacacaagccagagtgtgccaggggcagcgaggtggggaggccagagagaggggctcccatgtgccttgcagccccttaaaaacctattacgtgtcatcctgacctcaccttgaccacgccctggcaggcatggtcaggcacacctgtagccagcacttaggaggcatggttacggtgtctccctacagggtggcactgcccacaatgtgctgtacattcccacatcaatcattaagcaagaagtgccccccaccccagaattgcctacaggcaactctgatggagacattttctcaattgagctttcctcttcccagacaattttagttttcgtcaaggtgacagaataactagcacaacacccaatcttaaatgaaaggagcctccacgcctatcccatcctaagcctggagtgtagcgtagaagagaaacttgttgagaatattactttgatttacagcctctgctgggctacatgtagtgcccgttacgaatatggcactgtgtcctatgcctctcttctccaggccggtcatttatctagatccttcctggtcccctttctaaaaacaggtgaatgttagtatgtccatgatgactgaaagtctgcagcaaactgactgactttggggaaatggttgtgggagcttcagctcatggctcagaagttccagaagctgaggcttgtgattgacatccgaagcaagaggtagttcacaactgaacccggagtctataccactggacactaactctgggtagatgtcatcagaacagaattgggcaagctcaggcaaacaaaatcccagcatggagacgggagggagactaagtgcgttggtaactggtagctgctgggagagggagagtcatctgttttagggagcggtccttgggaggttgaccacattccagcagaaggccacacaggcaagagtaatggcagtgtgactcgaacttgataggtttaggagaaaacaaagaagtagagaatagaaagttgggtgggagggtcctacatgcatcaaaggatgctgcacaacgggtttcagtacagtgggtaccagaggttggagctgagccaaggaaggtttggccacatctggtttagggagtggatgttggacgtgctcattggccacgtggaaaaatgctactttaactgactggaaaggtactgcgacccctcacagggtttgaagatggtaagagagcatgactagatctgagtggatttggatttaagatgacaaactagcattcggtgtgatggtatacagctataattccagcactgggaagacaggaagatactgagttccaagtcagtatcattagctcaaggtcagcctgagctatgtagtgagaccctgcctcaaaaatacaagtgctgggagatgtggcacaatggtaaagcccttgcctagcaagaatgaacccgggttcaacatgcagcatagggagaaagagagctataaagaccaagtaagtttctgttttggtcttctatgtagaactctaaaaattcctagacttcctaagtggtagaaatgcttccttctggtatgtggtaggtagggttttagttgggggggatggtaagggaggaggggagggatagggaactgggattgacatgtaaaacaatcttgtttctaattcgaataaaaaaacatctgccaaaaaagaacttcagaatatcatatttttaaaaataataaaattacaagattatctctttagctacagaaagactggtaaaattcaatgtcttttcataatgaaaagcactcataagaatagagggaatgtacttaacatgatgagggcatgtctgtgagaagctcacaacttccaggtcagtgtagaaaagtcaaacattgaaagttttcctctaagttcaagaaaaacacgataaagtttaccttctatcccatatttttctatggagttttgaaaattcaatcatgaaataaatgaatcaaactaaaaaaaagaagaaatgcttccttctaattttctggtgatagaagcatgatttattctaatcaactgactctcggtggacacctggattggagaggctgcaggcaaggtgctcactgccatgtgtccaactccatggagtaagaagcgtctgtgctcaggattgtggacagaagtttctgtcccaccaggttccatagccattagtccccagtaaacacacagaggcttatattaattataaactgtttggctgatggctcagccttcttattggctagctctatcttaattatcaacccatttctattaatctgtgtatctccaagttgtcttggcttactggagaatgcccaggtgtcctattttcccagtagcaacagccatgacttctatgtttctcttcccagaattctcttagtctgatagccctgcctatactttctgcctggctatgtcctgtctgtccattggccaaaagacttttattcatcaaccaataagagaaacatatattcacggcatacagaaggatatcccctatcacagggtccttctcaaccatgcccctgacctttatttggctgttctttacaataacttattatctaaagcacttctctgagatctgtgggatattcttgagaattatgacagagggctcctagaaactcttggtttattgctggtttaccaaattcatagctggtaatctagactcccagggtcaccctaggttgagggggacaagcaatctctgtggagtctgtactgcttccagtaaggtaggatcagtgctaaactgtaggccagggaagtgggtggtactgagaattagaaaattatttcccatagggaaagactacaacatatttgatggccaagagtacagaactaaaaatagtttgaccctacatcgtcttgtgcaaatacaccttgactctccatagcagagccatggcttacaaggatgctttcttgatggtctggggtcgggtccacagcaaaaggtatgggagttcactgttcactactgaactgaactaaaagacaacatggagttaggagaagaaatgatgaatgttcaacagaaggtccccgctgcaccaatttgccaagctttctggctgcacatatttggccacctaaatgtagacccagaacatacacatgatgagaaatagttgactttccctttgccccacaaatagcctcggcccatgcactctgttaaccagcctggatggatgtaacagctgttcattacaagaatgctggatgtttgtcattgccagatggtaacagctccccagggcaggcaggcaggcaggcaggcaggcaggcagacacacacacacacacacacacacacacacacacacacacacacacacacacacacagagagagagagagagagagagagagagagagagagagagaggggggtacttagtagggtcaataatactgatattccttggtgaagttactgaaacctaggcttgacacaaaggccaagaattaaaagcatgctacatctgtcattaatattttgaatacttgctagggataaaagcttttagtttatatttcaaatttatagacttaggcaggtcataaccaccatatcatttaaacaaatgattgttccttgtaccttaggttcccctccccactctgctcttttcatgggaggaagaaaagttttcaatgagtgtctcactagaagacaacaagatgaatccgtgcccagtgtggcagggggctccttcttggtttgtgtggatcaccacatttggtaaaagctcctatgaaaaaatatcactagaaattcttactgacccctccagtttacaggcaaaatgggtagctagatttagttacatggttactgtggaagaagctagagttctctaagtcattctctccctattcaccctgtcttacactcactcaaacacacacacacacacacacacacacacacacacacacacacacacacacacaaatatataaatcagaaaagcagttggcagttggggatacagcgtgtagtggagtacttgctcagcatgcaggacaccctggggtccaatcccaatgcagcaaagatagtatgtaagaaatagagaggaatagatggttcttcatgacatcatatactttcagaattaaataaaacaaggtttggacatcaggtttgaagtagacttgaagtcatttagttccatcacttgcccaattcctttaacatgtttaatacatttatttgtatgggtgtggggatgcaccatagcatgtgtgcacggcagcacaagtgcatgccagaggataactttaggaagctggttttctccttccagcccgtgagtcctgggagtagaactgagatcatcaagcttggcagcaagcacctttacccgctataaaccgttttgttggttctaccctgtgagctcataggccagctcctctcagcctcctaaactcagtctatctcttccctgggaccttttgttgatctatttggggcattaagctcggggcctcatgcaagctaggcaaatgtcctgcctcccaatatccccagtcaattcttaagttccttcaacgtcactctgacaattagttaggagccttggaccaaacacttctgtagatgggaaagtcatttccacctgagatggctcattccatcttctgctaagatatcagaaagctttcaccatatatggaagcaaaattatgcccttaaacttttccctgcattggcttttagtttcctgaataaaagaattgataacaacaatgaatatttaggtacttaaaggttggaaaatcttatttcagctcatatgtgagaaaaaccttgacacatttgtctttctggatttggcttattttgcaatttcacatgtttttatgaaaatggtatagtttttctttatggctaaataaagccccctatgggtgtaactttttctttaaacatttatcagttgaagggtatctagtcaatatcctggctattgtcagcaaagcttcgataaacatggatgtgacagactccttcacatactcctccacatcccaggagtggtgcagctggatcagatggtgggtctatttttagttgtttgttgagagacttctttgcttatttccatagtgactaaactaatttatattcccagaagcaatgtatgaagatatctctttccccacatccttaccagtattcgttgtttttgtactttttgtctctgtccctgtccctgcctgccctctccttcctgagtgtgtgtgtgtgtgtgtgtgtgtgtgtgtgtgtgtgtgtgtgtgtgtgtgtacactttccatcttgtgtacacaggctaactgacccacacgcttcccctctcactgggattatagtcacataccctagttatgtggcttttcccaccagttatttctccagctctgtgttattgagagtcatttgaactgggatgagatggactctcagtgcagttttggtttgtgtccttgatggctttgtcatcttttaagaagccccagctcgttttgtttgcttggttaatgatgaggtgatttgctgttgaatgattcattttatagctctttatatgtcctgggacattttaattcatgagtaagagtgaaggcagggaatggcagtggtcaagtagggcgaagagacctgtgactctgcttcagtgtgtcctgatggcaggtgctgtagccctgcccgtggtatctagagtctgtctttctgtcagttcacttgcacatgtgctgttcagctgcagcgttgggagctgatgtttctgtttgttttgcttgtcttatcattctggttataatgaccaggtctggataacccagactggctttgggtttgtggtcctccatccttccattcccaagtgatgagattatagacatggtaccaagtctggaaagggccacttggtgctcggttctttcactgttttgttttgcttttccatttgttttataaggactagaagtgaagaagagacagggaccatcatgcatgttggaacatattccagattggtgtcagacatgtgagtccaaggacaacccttgccttccccagcatgagacttctccaatatttgactttttagttttagcagggctgcaacctgaatgcaagcctggtcatgaaagccacagctcagtcccttagtgtactttagaatcacgtaggaaactctttaaaacttatttttattaatatgtatgttcctgtatgtgtgcatacacatgtttggctgcccatagagtagaagaaggtgtcagatagcctagaactggagttacaggttgttgtgagcctcccagtgtaattgatgggcactgaactctggtccttggaaaaagtgacaattgctccaaacttcagagccattcctccaacacccatttaggcaactttagcattttctgaagtttcgtcctggtcatttgaactgtcagcaaagaagtacatcccacacaaacattttatcatacgttcattcatatctaatgaaccatcaaccagtgaacttctttctcactttaatataaagattggttatttatttattatttattatgtgtggtatgtatgcatgtacgctaatccttgagtgcaaatgtggagaccagaggtcaatatcagatgtgttttttttttttctcttgctctctaccttatgattttgagacaggttctggggtttctcctgtaagctagactggtggccaatgagcttttgggaacctcatgtctgttcctcaccctcttcctcagcactggggtgatagatgactgcctcctgccaaggtttttaactgggttctaggaatccaaattactgtccccatgcttgcagaccaaatactcagtgagccttctcaccaggcaagaaatctttttttaaaaatttaatttgtccctcaactgaagaaaggatagagaaaatgtggtacatttacacaatggagtactactcagcagggaataaaaaacaatggaatcttgaaatttgcagacaaatggatggaaataggagaaaccatcctgagtgaggtaaccaagtcacaaaaagtcaaacatggtatgtattcactcatctatgagtttttagacatagagtaaatgattaccagtctacaatccacactgccagaggagctaggaaacatggaggaccccaagagaagattgcatagtccctcttagaagggaagggggacaagaacccctgaacaaagtgggagctggggggatagagaagaaggaggtgggaagggaagaagggggggagaataagaggactgagacaggggaggaatagaggagggcaagaaaggagatgccttgatagagggggacagtacaggtatggagagaggtctggcacaggggaaatgttaggggatcacagggacgaccctacctaagaatccaggcagtgatggagaagatgccattgatgcccttcccctataatgagattgatatctatcttggttaccattcctagagccttcatccagtagctgtttgaagcagaaacaggcacccacagctaagcactgaaccatactcctggaatccatttgcagagagggaagagggatgagcaaaggagccaagacggtgctgcagaaacctgcagaaacagttgaactgatctagtgagagcacagagaccctagtcataaagctggggaaccagcattggactgaacaaagccctctgaatgtgggtgccagctaggaggccaagacagtctatggaacctctaacagtagagccagtctttatccctagagcacaaatggactttgggagcccattccctatggagggatactattgcagcccagatacagcaaggatggcctaggccttcccaaatgatatgatgcactttgacggtaccctgtggagggcctcactatccctggggaggaggtgggggtgggttgggggaatggtagggaacatgagaggatggaagggcgaggaaatggggggatggatatgtaaatgagtgcctctaaaataaaaaaaacaattaaaaaagaaaaaaaaattaattttattttttaagatgcttggaggtttcagacattatttcagcttcttggtggactgtgaaggcttctcccttcctgtcttctgttctttggtgcaggctgctttgacagcttttacacttgattttcatctggccagtgatagagaacctttcacaaatccatcaccactgttttgaaatcttctaaagctttctatcctgcctctatttttcactttgctgcttattttccttttaaagtaatgctactgtgtactaaatagttattatagtccctgtgtattctctggtcctgttcatttctcttcaagcacttccaagtcctgaaatcatattgcatatctgttactttactatttatctaccttgtaccaaacaaaatgccaggtctgtgatgctggccttcgtcatatccttactgtacccttgctatcaaagccctggctgctccatggcatatgctaataggtacttagtgaataaataaataaataaataaataaataaataaataaataaaaagtggagaagtatatacagagattgctagcaggtcagagatgtactagactctgggacataacaccttaacctttgtttccccaaagatttgtgctcctaattcatttagcacccaagatgttaaattgtcccaaggatatgtgggcaaagaggacaagaggagctggtcacagggtgcttgttctaatgtgccttccaatctgtgtaaacaacagatccttggatctggtgagcctacagaactggccctgactgctgttgtcttggattaacaatcctaacatccctcttgtgctcactggccagatggtgctggctcctgggctctccccggccctggggtgcggccagagcacctaggagcatgcacagggctgggtgtccgagcttcccccaccttcccaacagctgtactttccttgccaactcaagcattttacaaaaatctcattaggcactgagtgttttccgccaagctgtgtccagagggcactgtggcctccctagagggctctctggagtctcctaaaggtaatagaatgaggaaaagccaggagattaagaagtggaaaacgaagggcccatttaaagtttgtgatcgtttgtcatggaaacctaaaggctatttcacagtaagagactgtggggtggaggttctgggctgtatattttctcctgtcctatttaagtgctgcatttgccgaattctccaggccagattagtagcagagtgtctaatcagtattaatctcccacaatgtcaccaagaccgcctatcaatctgcataaattctatggcaaaactttcggaagaaatgctattcaaagcaaatgatgcatcaaattcaaacaggccatcaagattgctaatggattttaatagcagctattactacataatagtattttcccaacagccgtttgttgatacaattcttcgtttacaagacctttatgtccaagcccaggagacagccgccactcatttataatcatttggttccacctacaaacaaatgctacttatttgcatttggatgatctgcagatctgacccactcccacctcattcaatgagaccaactgtgaatattacaagctagattaattagttaatatttagatgctctactgccagaataagaaagactgcaaactggcaaacttaaagagaaaacttacgggttgcttggctacgttttgagttgtgatggttgttgcaaaccgatttttattcctatgtaaattagcaacgggcccaaattaagattcatctagaagtttctgaaacctaaggtgcgctaaactctcctgtttttctgctttagatgctgagagagtggtaggaaactccagccagagtgaagggctggctgctcctggtaaagtcattattagaaggactgatgtgagggagtctactacagaaaagcaaactttaattcctatagcatagctaacattaccgatttgagaataaataatagagtgtgagctcacaaagtctccactatggaacacattaaaaatgcagccacttgggccccttggccacagatatgaggagcagcccaggaattcacattttaatcattgctccaggggattcagtggtagcctgctgaggatcatatagcaagaaaattcagggaaactggcattaattcatatattgcacctaaaatcttgatgcaatattaagctttaatgactccaaaattatgcactaaaataaatgcttgaaagcattataaataaatgcatttgagtgcatattttcatgtctattatattgagttttgtgaatttagaaaatgattccttattaatattttcatcaaaacttacttaaaaagtaaaataagaacaatagaagtaaataaatgtagttttttagaaaaattatttattatgtatacaacattctgctttcatgtatatctgcacaccagaagagggcaccagatctcataatagatggttgtgagccaccatgtggttgctgggaattgaactcaggacctctggaagagcagccggtgctcttaacctctgagacatctctccagtcccataaatttagttttttaataatctaaataagtataaaagaagtacaaacaagtatacttctagatgcaggcttttgaatttttgtgattatttatacttctgcagctattaccatataaaacctcagcaaactttttggacctagtgcatagaacttaaataaattctgcctgggtgaaatcaggagcaggggtaggatctcccacctgcctggccaaagttcttttgctttttgtggtctctgtgtgaactccctgtgtctattgcttaggagatgctgcagcactttgcttactgttgcagttagtagggtgggaacagcaagggaacggaactgcttggctgcatccaggttacaaaggatgcaggccttttctacccaatacctcaggaggctgtttaaagtagacatcatattttatcacctcagttaagcctctccacaatttgaatggtggagaaggccatcacccttgggaattcctatacctggtacatcagaaaacaaaacacttaggtagcaaatggctgaagactcaaagccatgcaaaatttccatgcaaaatcttggccagacagaggtcaaggcaatgcatccttgaagaggtagtcagaggcaggtaagttctgggaggctgccatgttcttgtggagcaggtgtttgctggagaaacagactggctgtagagaatgcattcctttagctggaggctatcccaaccccaacagtgttctagcacagggcctggctgctgctcccctccttgtgctggtcttccaccctggagacagccagggaggtgtaatagagatgcacattgcccacctgagctctcgtgtgactggaaaactcatcatatcatctcttgggcttatagttggttcctttagaaatgaagagaatgatacagaaagaaaaacagccccatttcacttttcttaaccatctgaaaacattaaatgaaaaaattcagaagtaaacagttacacaccagtctgcccctcctcactcactccatgcctcatccctctgctcccatgagtcacctaacatctacctaagttattataccattgcagatctggtgttcaagtaatccttattttacttaatagtgatggtagcaatttgggaagttgcaaagggctttctttaagtgaaaaggtgaaagtttttaatttagtagggaaagaaaacatccttaggtcactaagatttatttattctaagtcattataatcaattgcttattgtgcctggcttataagttatactgtgtcatagttatatatatgctgttcgtatctgaagtacctcagaggctcatgtgttaaatgctctgttatcaccctgtgggattactagaaggtgatggagccttcaggaagtaggacctagaggaagagtaggccactaggatcatgcctttgaccaggacattagaattcccatgtcctctctcactctctctgtgtgctgactgccatgaggtttcccctgcaaatagtctttcatgaagttctggggctgctacacagccagagcagcaaggccaagaaaccatcatcagaaagcctggaatttggagccaaaataagccttttctacctgtaagttgttttacttattcattttttttttatttctgagagcccagatcaaccttgaactcactatgtagctgagtatgattgagcctcttctcctgcctccacctcccaagttctgggatcatagacatgtaccaccctggcttcctggaaggtgtttgcatagtgatgcatgtagtctataataggacatcctacatatacacatagggcttagaactgtctgtagtgtcaggcatccactctgagtcttgggttgaaattcccaaggacaagcacatctgggggggggcacagcacgtgtgtgcctgtaggtgtggatgtgggtgtttgtgtgtgtgtgtatgctctaattaccactttgaggctaaataagttgagttagataagatgtagactgacaaggagcttgtcgcttgaatctaatgtggctgctgaatcacagaggcagagctgtggctggctgactgcagagcctacagatgctactgcagcctcagcatccatcatctgccaagcatactctacctgcttgaatgaatgaatgtgtaggtgggtgggcagttgggtgtcagcatcaattttaaacttccaccatcacatacaagctactttcctgatatccttatttctattactaatatcatgtcaatcataacaccttaggataggcactttaggctcacccttctcatactggtgcaatacattattgtagaattatgtcccaaattctaagaaatgaacttttgctggctttcaaagccaattaataatacaccttgaggtcacctaagactagagtgctgtcttttgatgtccccagtctgtttgttcaatctgcttttacaagaacaatataactatcaaccttacttgccttggatttcctatgtaatcagcctttacaacctagggtaatgtatagctttaatattaaattatatagtcttccatgaccctgacccagagagcaatgcatgtgtgtatgtatgtgtgttagtcattcactaaaaacagcagataggtgaaaaacaactatatacagcaaatacccgccccctgtagagttgaaagtaacacatggatgtgacttgataaggatatgctcacagcactgagtgtccatgggtcagcaggggtcagcaggagcacacagcttaagcccttctaaaaccctgttaaagatgtctataaggtccttccccaggctatgctttctctgctgttcaataaatacagagcagagcctttttctaggcatgtgcagattcatagctagacatcaggcaggcaaaggcgtaagatagacacaggcaatagaggaagatcaaatacacgcagactacagacaagccccaaaccacagattatagatagaagatatgtggagagaagaggggaattcatcttgggcttgcttgtggtcaaagtaatacaggaagtactgaacttactttccttaatgaaacaccaacacatatggtacctctgaggctatctttaatgcatttcatgaaccattttggtgcttcatatgaggtatctttaatgtgtttaatctatagatcacaccccttccatcaaatcattcacaattattattttctgacccatcattatttctttctttagtaattccacattaccacatgctaataatttctatccagactcatcaggatcacctttctgttactatccccctcccccatgagctgtacctggatttatcttctgaacccccaaagtactaagtaagcatcactgtattctacatcatggcgagaccttatctgttccccttcatctcctagtgtgtccctctagctgaaggactttactgaaaccaaagtaaatgccccagctcctcaatgcagttgaaactattgtacccacactcagtaagaaacatgtacctatcaagactcagcagcattttataaaaagtagataaaccaaactgagtataactgtttaagttctcctgctcaaaaaacagacagaaaccaggagcctcatctgggaagtttaggactccctcatgcctttctttctgctaacctgagagttgccttcagtatagcttacacctcactgctcctattctcaggacacaaagcatgtagaccgcttcatggtagcagacaccaaggaaagggaggcacacttgcaggtaaaggttgcttatagctgtgttgggcatgcatgtggtcatttggtaaatatcatctgtattagagcattgcaaagcttaactatacatactatttcaaatccacatttaggggtctctaacccccaaaggagcaagaggcatattctacttaacatgtggtaggccttaccttgtagacctgaactggacacaactttatttctgggtaccaaagaccagggataagggttgctttgttcttttactggaagatttttcttatcctgctttttatttgaaatactttttggtcactaggtggctctgaattctcattgaaacataagaccttaagaaatactgacagggctggatggctcacaggttaagaggactgactgctcttccagaggacccaagttcaagtcccagcacccatatgggagctcacaactgtttgtaactccagttccaggagtcccagcactcattgcaaaacagcaatacacataaaataaagaaaaagaaatactagcatatgcatttccttttgccaaaaaattaaaaagtttttgagaacattaatcagaggttaccaaaatctccacaaacttctattaacagtctttatgccgctaacatttgggatacatttttatagtttcatgtaaagtgatgactattgccgtagtcaagcagggagtatttaaacagttcataaactaggtaccacataataccacactatagctgtaatgtgctgtgtataggccagcgtttggcttttttatttaaaagaagttttcaaaatattgtcctgtaacttacactgttttaaaagtttttctgaggagggctgaggtgtcagctcaggtaggtaagtgcttgctgggcgagcacttacgtgaccccctccccaacacctatgtgagcacaagcatagcagtgtacctcagaaaccctagtgattgagaggcagatgcaggaagagtggccagtcagtatgtctgccacagtgagctccatgttctctcagagtctctgtctgaaactgaggtgggggtggggtggggaagaatcatggcatctatctttaagctgttacttgcaatctcatgagcaagcatgcacccccccccccacacacacgggtgaggtgggaagagaaagggggattctctaagcatactttagctaccctgggagtgaccaatttttcaacttttgatttgtatgttttaacggatgaaacggcagccttcactctcagttgaatcttctgctctagccccattgactgcttgctgccactgaaacatatcctgacacataaccgtgtactttcttcctgggatgcaatgttccccctctctcttcagctgataaattccctctttttctgcaagtctgatattaagtcatttgatgcctggagtcttcattcaggacaaggagcctggtacacggactgaggctgcctcagttggaagttcagtcacatcattcactggtcatgagagcctaagcaagttaatttgtttctatttcttcacccaagagtactagcgccagagtccagagaagtttacaaaagctactaaagaggaaggactgcaatggtcaatttttttgtctcttttgtaaggattcaggcattatgggggcctgcccctgtcatcgtacactcaggcagtaccctggccagcttagggttccatgattgcataatcttcaggcaggtgcaaagaacccctttaaaaaaagagtttgcccactctctttcctctctcttctctttcctgctgtttccatgggggcagacaggactcttctgtcctctctctgtctctgtgtttctttacctcttttctctctccctcctctttctttctttctttctttgttgttttttttgttttttgagatagggtttctctgtgtagctttggagcctattctggcacttactctggagaccaggctggcctcaaactcacagagatccgcctgcctctgcctcccaagtgctgggattaaaggcgtgcgccaccaacgcccgccccctccctttctaataaaacttctcacttaagcgctgtctgcctggcacgtttgtccctctgtcttggtcagcctcgaccagtatggaatccaccaaggtccccctcacgcattaatcacaataaccttgacactagctaaggaagagggaacctcaattgagaaagcctgcatcagctgggcctgtaggtatgcttgcgggggcatttccttgattaataattgatatgggagggccaggatactgtgggtggagtcactccagggcaggtgggcctacattgtataagaattcaggcagagcaagctatgaggagcaagccagcaagcagtttctctactgcagtggttctcaacctgtggttgtaactctttcagagtgtcgaatgaccctttcacaggggccgcctaagaccaccagaaaacacagatatttacattatgactcatgacagtaacaaaattgtaattatgagatagcgccaaaaataagtttatagtagtgggtcagcacaacatgagggactgtattaaagggtagcagtgttgagaactcctcctttatgaccttgcttccattcctgccttgagttcctgccctgacgtttcttcatgatggactcttaacttgtgagccaaaataaaccctcctgactctgagttgcttttggtcatgatgtttagcatgacatagaaagcacaagggctttgaacagcacctggatcccacatgctctctaggagtggggaaaatatgtgatgcacacagtacaagtgagctacaagcaaagcttagatgtttgtgagcatttcacactgcatttggatgacatgactcctctctagtctctcctgcactaaacagcatacacatgaagcctaggttgtctttctccatgcccaattcttccactggactgtgatagaacaaaaataatgtgtaccttgtttttcgagcctccctggccccagtaaaacattttgatgccatctacctagcttccttgtttctggcacattctggtaaatgagatgatggatcaggacaatttctccgtgtaaaaggtacccaagacttaggcaacaggagaagataggaaattgaatgaggtgacatgggctatgcattgaccatgtcacagcattggagagctattggcaaagctaagaatccactgtggactaggcttccagacttctagaagtgacatgcaaatctcaggattttatgttttcaggttcagagattatatggtatgaagggaaggacaattcatcatttgttagtgatttcagtcactaatcattcatagagcaaaccttacaactcctgcatgttggacattgttttcagtactggtgatcaagctttccacagacagacagaccaccctgtggctggtaaggagtgaaggttagtgaagcaagatagtaagtaaataaatctatttcaagagggtttctaacagtgacaagtgccacccagaataaacactgtgatgggaaagagcatgacatggaaggaaagttagtgcgggaagtctggacattcagaaggttgcatttcagtttacattcctgcacaatgagagataattagccttgtcatattccgaactcaaagtgatccagagagaagaacaagcttgtgtgagggcccaggactgatgaaaacgcagggatggttggcacagcagcagaggagcaagatgagactgtgcggcaggtaggaccacatgacacaaagctttgcatcatgggaaagaatttggattttcctcaaaggcaatgaggcaggcacccaagattttaagtaagggtgtgcatgcataatttacatttgttgatttatgcagattatgcacgggttcagtaaagactggactgcaagagggaaaagcaaagatgccagctaggctggtagagtactcaaggtgagaaggcctgctcaaggcctttggaattgaacaatgctttgtttggattcttagtggatccctcttttgaaatggaaactcattgagggtgtacttttgttggttttattcattagtattatatccaaagtgtctagactagaacttggtagcaaaggacatgttaagtgctaccaatgcagaaaatacaatggtgtgggggaaacaggagaaaaggcaagcactctgtttagagcatgttaaacttgactgcccattagacatctgtggtggtttgaataggaatggcccccacagcctcatatatttgagagagagagagagagagagagagagagagagagagagagagagagagcaccaaatcctaaccactagaccaccagggaagctcatatatttgactgcttggtcatcaggaagtgggagtatttgagaaagattagggggtgtggccttgttggaggaagtgtgtaattgggggtgggcccaaaccaggcccagtgtcactctcctcccattgccttggatctggatgtagaaatgttagctatttctatagcaacatgtctgcctttatgctgtcatcatccctaccataaagataatgggctacacctctgaaactgtaagcaagccccaattaaatgctttcttttcttcgagttgctgtgctcatggtgtctcttcacagcaacagaaaagtcattaagataacatttaaagatgctaataggcatgtttgaggtataagctttggttcagttgcagctagttacacactgagggaggaagtggtgactcacagactaggtatggcattagagaaaaattgatgtgctgagaactccaatattgaacagctaaacttaagaggaaggggtaacacagcgggagatagaagtttccaaaggtagaaggaatccaggaaaaataatgtcataaaagccaaggtgaaatttatatgtttttaaaagctagatatgacagaacacacttaaaattctggcattcaggaggttgatgcaggagaattattaattcaaggttaatgtggatcacatagcaagattgtgtctgaaaaaaaaaacacaaaacagaaataaatagttgatagtgttgaatattgctaagaaagatgagaatagataaataaccctcacatttgatgatagaattcacaagtgactatgataagagaagttgcaatacaattgtggggttgtatgtgtgcctagagtagactaagggaaggagaggcgcaggaaacagaaacaggcactgtacagggctctgatgttagcatctctacccaagtaggctcactgtccaatgaacgattgctcaatacttgatgtttcttgcatatacaaaagaataaacaacccatccatcaagccctccattggttgggtctgtgttttcaaatgtaggaggcatagccttctctagtgaaaagacacttggatcaagagttaaaaagcagaatcatgtctctgtatcactgatcagcttgctgaacttaaccaaacccatatttttctaggtttcagatttcttgcctataaaacatacaaaacaaataaattagcctatgtggccaggtggtggtgatgcacacctttaatcccagcacttgggaggcagaggcaggcagatctctgtgagttcgagaccagcctggtctataagagctagttccaggacagcctccaaagccacagagaaaccctgtcttgaaaaagcaaacaaaaaaaaattagcccacgtggcctttaaaatccatctttataattccccaacaaagacttagcctttagaaaattcaaactccagcataagcacagtgtctatgcaatgccattcttggtttttacaaattagcttcaagcagaagtgctgaaactttcagggaattccatatgttccctccacagacagagcccttctgtgtgagactgatgccagcagcactgagtagctggctctgtgctttgtaacaagaatatgttattaatggtcactggacaagaaggtgtcaaacttttccttatcacacttttctttctaacctgaacaatgcttaattctcttttactaaaaacaactggcatattattagattctccatttaaaccaattagcattccatagttttgttcaagctcaaactgagcttcatgaacaattatataatgctcataaacaatgactttacttaccttgtccttcagaatggttttagtcatctggtccctatgaactccctcatttcatcttataccaatccctccttgactggataaatttctgttcctattttggtgggggttgggtctcatgtagtcagtccagggtggtcatagccaaggatggccttggactcctgaacctcccaccccatttctcaagtgttaggataacaagtgtgtactacctgcttggtcttgagtgtgttaaccttactcttgccataagatccttgagatctgccatttgtccagcatcctaccactagattttctcacacctggagctctctgctgacaggaaagggcctgttagctcaaacttttccattgggaaaatgagcgactgctgttaaacaacacaattcaaatcatataaacaacagaatttccttaatagggctttattgcctattaaggatgatgcccaacctaccatcccttcctgctctctattactcaaagtctgtgcgcatttgccaagctaattttaatttcccaaagtggtcttctgttgcggatgttggaatgtatccagtttaagaaaaaaagcccttagaattactatgtatcaattaagaagaagtcaaataaacaactcatattaccctcagatcttttccattggggaaaatgactttttaaattaaaaattgtttttgagaatttcataatgagtactgtttttacatcatttatacccctccttcttcccctgtactccctcccttaaattcttaaaattaatgacctttacttctttaattattatatatttacatatatatacacatgtataatacaaatatatttacatttatatatatacacacatacacgtgtgtgtgtgtgtgtgtgtgtgtgtgtgtgtgtgtgtgtgtatgtgtgtgtaagtctatacatttagtgttatcttgtgcttatttgtttaaggctgactacttggggttggataacctgttggggcttatcccggaagaagagattctccctccctccattattaattgcctgtacctcttcatctaggacagcagttctcaatgtgtgggtcaaaacccctttggggatcacacatcagataccctgcatattgaatattcacattacaatctataatagtagcaaaattacctttgtgaagttgtaacaaaatagttttgtggttggaggtcaccacagcatgaggaactgtatgaaagtgtcacagcattaggaaggttgagaaccactggtctagggatagagctttcttaggttcctgatccatgttaacattttcataaaacagacatcttttgtaaacctagaaaaatcccagaatgggtaaaaagatgaccgacttttactggctctgagttctttatgcatgctatacagcttcctaattgtaatatatttaatctgtagtcacatgatgacaaattaattcatcttaaacaaatatgtgcagtcacaatgtcagaattgtttctttcctatgtctatgtaacaactggtaaaaagaatttaacaagaaaacatacttagaagatcccgtgtgttaattaattttggtaaaaataaccccacggggcaggggaggtgggagtgatggaataacacaaacatagaaacaggacttagaataggaagaggggaggaaactcaagcagatgagtgttaggagacactagatctattttaaggccatgaggctaggaagggacaggtatttttaaatttaattggagcatttcaattaacaatgagattaactgcttgaaaacctgggtgaacaacagggaaaataatttcaactctaaaccataatgaaattgagatttaaaaaaagacgagctaaagatgcaagaagaggcggatccagcacctctgggaagaggttgcatttttaagggtatcagatttgctaccagcagtgaaatgatactgcccagtgcctttgtttcttcatctgtgaaatgaaacatactaatgcctgtgccacagaaagggttgtaagaaaatgacaatttataggaagttcttgccacactgtgaccatttggtgaattatgaaaacaaaagtccaagccctaaaagaaagagaaaaatccctatcaccaagacaagctgggcaagattagacagaaattaaaacagtttgttatctctctctctctctctctctctctctctctctctctctctctctctctctctctctctctctctctctctctctctgtgcgtgtgtgtgtgtgtgtgtgtgtgtgtgtgtgtgtggtgtgtgtgtgtgtgtgtgtgtgtgtgtgttgagacaggatctcactatgtagctcacaatccttccaccttggtctcccaagtgctggggttacaggtgtgtgtgtgtgtgtgtgtgtgtgtgtgtgtgtgtgtgtaccactacatctggctctggaaccttttgtatactaatagattgtagatgtgtgggcattgcttcagaggcccaattactatgttgttcctcaggtgccatccatagtgtttggttctgtctttttgagacagggctcttcacctgataattagattagcctggctggccagtgcagacaccaccatgccactttttttttttttaaataatatgtgttctgtgtatgcaactcacatcctcttgcttacaaggcaaccactctacagctgagtcatctttccagtgccacagctgcttaattttttttttacaaagccattaaaaccatccacagatgtaaaaacactctacattttgaagaataaacttagataggtatctctcattctacacatcaattcaaaattgagcaaagaccttaatgtaggacctgaacatttggggactgcaaagatggctcagcagttaagagcactggcagctcttccaggagtactgagttcaattctcagcaaccacgtgatggctcacaaccatctataatggaatccgatatcttcctctggcatgccattatacatgcagagcacacatacataaaacacaaataaaattaaattttaaaagaggacctagaaatttgaagctgctaaattgggtaaccatcttgggataattctctggacaaggatttcctaaagggaactccagtggcttaggaaataagcctaagaactgacagatggggttacatgaaataaaaaagctcagtgtagcaaagcaaacagtgaccagaggaagagacaacctgcagattgtggaaagaatatttgcaaactacacatcagacataagtaaatttcttgggtatataagaactgcagaaactaaccattaaatcagaaccaatgccatctagtcaatagataggctcatgaactgactagacaatgttcagaggaaaagataaaatttccagtaaacatttaaagaaatgcttaacatccttagtcataagaattgctaattgtatctgctttgagatctcatctcacctcagtcagcttggatataacccagaaaacaaatgctggagaaaatgtagggactgaaaagcccttttcactgctggcgggaaagtaaactttggtagccagtacagaaatcagcatgcagattcatcaagaaattgctgacagaaccaccgtatgacctagctacaccactcaaaggactctaagtcaacccaccacagagatagttgcatatcaatgtttattactaagaactggaaccaacacagatgtccatcaatactccaatggataaagaaaatgtgacagataaaaacaggggaattgtatgtagccatcgagaaagatgaagtcatgacatttacaagaaatgggtagaactacaaatcattatgttgaatgtaataagctggactcaaaaaagacaaatgcagtatgttttctgtcatatggagaacctagatttaaaagtgtgccgtgtgtgtgtgtgtgtgtgtgtgtgtgtgtgtgtgtgtgtgtgtgtgtgtgtgttggtcaggaaactagaaaagggatcctgacatgtgagagagatatcttaaggtggggtggtggtggtaaggaaatacatgtggtaagaaagcaaaatggggatactatctgaagaagagagacagacaaatggggatgagaacaggaggagccaattgggaggagggagtttgattaaactaagtgggccaaaaaccaaaacccaaagtgaatctgagaaaagctgctagccagggttatccaaacaatgaaatatctgatttactttatgagggtggggggaggaggctatgcctggcttacctaacatttgatggagaatttaggagaggtgcaaggcatctttaaaatatcttagctattaatattgtgcttaaaaagactgatttatcttcctagaagcctcaaaaacaaatgaacaaacaaacaaaacccctagctattaacaaaggaagttctggccctgggtaacaaaggctgagcatcacaactgagtgttttcatccaataggcaaattcatccttgaatttgccagccagtgccacctggttcacataaatacatgatttattttagtaatttctccaataatttttattctgctttaaagggcagtattgtgtgtgattaaaataaagatctcagaaccagttttgataaaatatgaaattggtgtaaattcaaatcttctggattggtgatacttatactcatggggaatagtttgaaataacacaagataatgagatagacaggggagaaagtgaaaagcccggatgttattttggaacaccgtctcaaaattttcttagtcatttgggggaggatttgaacatgctaatacttttacaattcacccagaagagttaggagtttttggagaatgatggaaatatccccatttacagctgaggatacattttgaaatacaacaaacaagacaaatcaccaatgcttgtttcactgcaataggcttttatagatggtaccagtaatcaacatcgttactttcattagcaaatgtctaatttgaagagaaagtttaaaaaccttgtgtttatttctgtgaaggagaactgtgtgacttggacttctgaatgtctttattcaacataaactaataggtagagaaatttccctgacagggatcagaagcattgtccctggtgctcataaatactgcactgtattgtctgaaatggcttatgtcagtcctgactgtgggctcagatttactgtacagttcatcaacttctcagcatgatggataatgaatgtttcatttacatcgctaattgccaagccatggttcctacaacctttaacccgtatgctttatcccattatcaccatatgtcaatataattgcatttaacattctgagtgatataaactttcttctatacagagaaatatttttcacaaagaaatcatgcgaaggctgttgatgaaacacaagtctgctacaggaaatgacagggatgtaaccagaatagtaggtagatgttaaaactaaggaaagccatctttggacaaggactaatttcatgtgcagaaaaataatagcatagcattaagaatcagtttttaagatttttttaattcaagaaatgaataaggagcctcaaagcaatataaaccaacatttggttcagtttaatacacaaaaatacataaaatcagttactgatagctatgtgatccaattatacttgctaggcttacttgatattctgcaaacaaacaggtattgaagcagcctctttcctgtcttccaatttggaactgaaaacatttacagagcctagaaaacatcacaagtcaaaaccactaagctaggaggagaaaaagctggcaaataattttctcatagtgctagcagaccgtcatctgaggatttgcccagagccaccagccaacagaacctgaggtctcccacctgaataacagcggtttccctccataagtgattctgtgcacccagtgattgttttagacttcacacctgggaattctcagtgaaactatttttctccatcatccccatagtcactctaccaacaaatcctatttgttataactcaaaagtatatcttgctttggtctatggtattgccagtcccatcctactctgagcctttgccacctctctggtctgtgagacagtttctaatctgtctctgtttttgttcttaatgctttccccattgcttgcttgccgcatcttccctccttacaattgtccattgtgaaacctaaaatgctgctggccagtgaggctttgcacagtctgacaacctgccacctctacagccaccccaggcgccttcctccctacagccagtacctaacagagcttctttccatctccccagggaacctatttcctaacttggagcctttgcactgctggacccttaccttccccccatcccctgttttctcctagcttatttctgtgtatcccagacttgcaaatttgaaagacaccttctcaaggaggctgtatacacattctccatactgtatcaggtaggtcataacaatagctgatggttcttaaagatgcttctatttgcctgcaatatatatgtacttaatgtctagttttcccacgaagctgagaactctaaaaagataagagctgtttgtatctgatttccctctgtccttagcagacacattggagaattccttcatagttaatgccttggcattttttttattgaacttttgctttgctagagtccagttttctctaacaaactcaagagcaaaggggatgtggacacaggtagacaagataatcagcagaacagaaagtgttgagaatgctaaggaaacctcaggacccttggaagagcgcataaatgagctttggtttctttgtatttaaatgatcctaggcaaggtcttactctatgtgcctcagtttctctaaatggaaaccagtggtgacaataatatcttcttcgtagagttctcatgaggattaaatgaattaagtttttggagagcattcaccctgtgttctgtgggagcatacttgctaaataaaaacaaaaatgttaaattacaggcaatgagacttggtttagggatatttcctaggctattgctgcctctctctatcctggggactggctctaacatccctctggccaaatattctgcacatacacagccacctttccttcccatgtttggagtccaggtctatgctgtgacttttctacattagtagtttaacatttcctgtttggttcagatctaatattttgttggtttttctcaaagtactatatttcctggcccagggcatggatgaaacatgaaggaatgaacctcaagatcttgccagagttaaactgggcaacatgtggcatgattgtggagtaactgtctgataattaccttccaaagcttttacagaaattcatttttatttttgtacacattataaacacttgataatcgcattctgttaataataccaccaggaaaattacaatttcaggaggcagaatcgtttgttacatatagctgtggccattttattgcagattctgtctttcaatccaaagactatggaatccttttctctcctttgttttattccagcatgaacctcacatgctgtgccttctcctgagactctgaaggacttcatttttttatccatctacccttacttgtaatcattatcaatcccttccaatgtacccccaagcccccatgtcttatcagttcccagatatattgccatacactattattttttccatggtactttatctcatcccctgagtctagaatgatgtaaagttttgagtaaacagactgtactgtcttaggtataacaaaaatgttatagaacttatggtcacatagggaattattagcatatatttatggtgattatgaaaacttagataatcatatggggtcaaagagttacagagagaacacttacagggcttgtctctaagcctgaggtatgaagcaaagggaagtaaccttatgtccacatatataattcaattctatctcaatccacaccacagtatcaaacagtcttcacagaaccaacaccagtcaaacccccaaaggtagtctccatctattttattatgaatgctcttaggaaactaagcaaatcctactgatcacttatctcaaccttgagatatccttgtccatttagattattgggagaaatgagccactgtatagggccccttctagaaggagtgtatttacaaatacctactctggattagttgttaagagctacagcgtgtgtgtgtgtgtgtgtgtgtgtgtgtgtgtgtgtgtgtgtgtgtgtgtgtgtgtgtgtgtgtgtgtgtgcatgccagagagtgcctctctccctttgacccattattgcagactttaaaacaagcatgttttcaaatggtactgtgagttgccaatgatgtatcacccccatatctcattattctccactaaatgtgataataatgtgatctgttaacataaaaagtttggctccacaaaagcagctggaaatggacaaccacaatatgcataaatgcgactcttaccatcggctgcacactgctcgacacatattgttagaagcacctcgcattggtgggctcttgtaagcaaaacacttgcattaggtctcagctggggctgagcatcaggcagcctgggaaatatttaattctcagcagaggccagaattgactcctcagtcttttaggaatcatttgccaggcctgagaggattgaggcagctcaggtgtatccacagacatctacggatggtccaataaataaacctatctttgaagtgatgtttatgggagacaaaaaataatctgaataccaggatttgaaactcaaggttttatggggttggcactcacaaaaattaaaaagaaatcaagtacaaagaggtagaggaatcatcacctctgtctgtaccagatataagtaacagtgtggcccaccaaaaggtgcccactcccggcttttaaatgaatgaagccagtggtgcaagtttagctgtactaaaggtaccagcctctagtcatccctacttccttaactgacatgtattaattagcccatagcctttgcttctgtgtatgtctttgtcctttctcccaaaatactatcaacctgttgttttgtcctctcttcaacctgttgttttgtccactgtcacccaagtatcaaggacttctgagtcttctgtccattcataccacttccagtctccagagacaatggaattgactatgttgccttgggttaattttagatatttaaaactctaaatattcacattcaaactcattatcttctatcttcccacctcctggacctgctcctttcccatactgcactggaacagcgtgatcctcagtgcagtaatgcagatttaaagccagtaactccatgtggagcccatacacaaggttactgaggctggatgactgataactcagtgtgaatgaggggatctctcctgggcctttggattcttagggataagatctgagctgcttccttgctgtccccagggttctctgtgtctccctcagtaccaaggaatcacagaatttatattaggaaattcctttttaaaaggtacacttttaatcttacctactgaatttacattctgaaaatctattttttctcaatcctaattccaattttttccccagtgttttggtattttctacatcaaatttaatttgttgctgctatttttcttattttatcatcaaagattcttttgttttctttactattttattttatgcttatattgttataatactgttttattattttattctctttaggatcaactttacttagtatcaacatatgcttatggatgactttacaacttttattcatttgccaagtctgtttatatgttgttatgttttttcttgaggtagaattaaggatgatacttaatccagatgtttagctgctctagcctgactggtcactatgacaacctacatggtgctctcaccagaccagcttcttccctctggcactcagaaagccatgtctgataatatgtttcccagagtccttcatcacaaaacttctccatagccaagtttctccatagctaagctttgctttactccctacagcaacctctacccttcctatgccacagcaacacccaactcaacgtctccaacatttcttttcattcatcgccctgtaggcattctagaacattctctgtttaagctgtccttctgtctgggtcctcttcatcttttaaagctctaagcaagggtcattggattcagatgacaatatcagtgactaatgttctttgtgccctcaaccgatttcataatttggtagaataggcaatgaacacccaaagaaatgaaattccctatgtaatcatttaccaaacttgactcaacatgagagtcaaaatagtattgaataagcactaatgtttgctcaacaaacaatctagtcaaaagaaacacatcttttatgatggatagagctagcacaaggaattgctttatttaaaaatattaatgacatctcatgaatttagttgataattattgcagttaataggccgtaaacccataaaccacccacttcctttacagaatgtccagaagtgcaatagagcccaatggtcccatgaacttccttggttgaaagcctcatccacttgctagtcatgtgccagtggggaaaaccccagccatcctcatctataaaataaggatgctggtgacagtggcagtgataagatgtaatatatagagagcatttagaacagtgttggacacaatggaagcacttgcaactggtaaggttattattccaatctgaccataatgacaacccaagtagggtcacacctagtgctggagattgcagggacaatgactttcagaataagaaaaggaaaaatttcagatttgcaaacacagaacatgttcttggtacacagctcacagacaggtctggatttgattaaacatttcggttcccaacatgatcctctgtttaactgctttcactctcagggaatgaatgatatgcctgtaagctacactttggaggcaagatagctatgttgctgtgccttgctcaaaagagcaagagcaaactcctgaacaccagtgtttcccagaggaagatgaaagagggggcttgtggaagctcagtttccatctaatgacttcagcttcacccttctgttttcagatgagcaatgggcacatctatcatttttcaggaaattttttagcaaacttaaacataatgttttccaaatgtattgtcatcttggacccaaagggaaatcaggaaactgactttaaagacatctactcgcctcactggcatttcacctttggcaaagatctttacatcattgtctcatcaagtcccacaacctttggatgcagccagagtgatcacaaatcttcccatttcacaggagcaatgacggctgaagttcacagtgctagtatgtggggagccagaactcaatacccaaacttcttacccagtggtctttccaaggtatcagaatggtattttctttccaaatgaaagttactctggaggattctagtgtgaagctgccctttgtaagtaggactcaggacaccagggaaacattcaaaccagaaaagactactgtgatgcacagcttttctagatgccatttacttacctggggtctaccttcacacaaggcaaacaattcctgaatcgaatactgccaagcatctccacaaggtttccccatgtgcacatgcctgggaaaccccagtcccagccacataagagacaagtgagtaacttcttatgcctgggcctttctccttgtccctcttccttctcttctcaaatgctgaaagttctagatgattgacagtcaaggatggttatcacaaatctttcaaaatcttctctctggtacccaaagtggcttaagaccctggttctcagcatgaggaatccagtctctcagataaatgggcaaccccttctttatcatgaacagggatcaaaaagcaaaagcagcagggatgaggctgcttctctgtgaattaaaccttgagaagttacagcactgatttgcaggcaaggtttgaggtgaggtttgtcatgtttcaacaacttgagcctgctttttctcaatgaagtaccccaccaggaccctccaagctgattattcaaagggagcaagtcatcatgcagcttcactgtaaaggtgctcccatctgagagcaatgtgaagaaagacggggcattgcatctcagtggttgccataccaagtctaggatcttgtctactgaaacaatgaattaataataggctgacctgtagtaagtctaccgtaaagcaacacagagtaactaactaaagtgagcccccactgggggaatcttcacctcagaacatttcctcagtgaacatcatgtcctctgagctaggaacaagacacatcaaactctctggttctgtctccccagactccccaggttttatttctgagatgctgaaccacgcacaggtatgtcttagatttgtgacacccctacatctttcttccatgtgctgggattacaggtgtatcccacaatgcctggagtttcaggaacaacttgatgttggtatttattgttattgtactaaccagtggcaaactacttccccccagattgccaggagagctctacttaattaagttagattcagtacaagagagcagatcttacataattaaagtggagaaagactgttttcctgtattcgctcgacgtggatgtgtgtttgccataattaagcctgctgggaaagtgatgctgagcctcccagatggcaaacatcagactaagacacgaagaaatgattttttgcttctgaattaattctgttcagatgattcggagcatcataacactcaataagctttcaggagacaacatggttaaaaggaaatggggcttccaatacaatgggagataaacagagaccaaacttgtaaaagttaagaatagcacattttgttaccagttctgttcaagtttgaaaagtgtccttttagggaacaccatttaatctcacatatatgtggaatctaaaacaataaaaccagtaaaatcagaaaatagaatgctgaacttggatcccagttcagacacttactgccagattcagaaattactcaaccttggcaagcagctgtttttttctctgtaaaacgggtaggtaaaaaatagatccatacttgaagactggacaggcttgcactggctagcagtggctagcagtggctagccactcaaatgtttgctgccatcactcctatccctttcctcaccctgttcttcacctaatatgtgattacaatagatatttggagtcaagtgatcattgtttcttcccagcatgggctgaaattggtactcaaggttgatctttgcccagtatgactgagaagggtctgttatccctggcagctttggtggccactgcagataagctagtctattgtattttggctagggccaaatgacagcaagactttctccatatgaccttcatcattagtgtgtgtgtgtgtgtgtgtgtgtgtgtgtgtgtgtgtatgcaatgatatcttaatatagaaaacaatatgcttttaatgtcaaatagtcatctcaaccttttgttttagtcttactgaagccagaccatggacttaaatcacatggctgaacacagaaagtgcgtgacagttttggaaaatgaaaccaattgttaggttgctttgcctacagagtagcttttggctggaggaatgagtcaggaagggaaggaaggaaggagagatgctggtaagatgtagaaaaagatgctgatgacacctgagaaagggcaatggctagaaaggggctaaacagaagggaacatgagaaaacacaacatggtggagcagtgacctgtgtcccctttctaaagagggctgaggatgaaccgacaccagcgatccccatgctctccatggggaagggcaaacacagcctccacatgggctgttgaaaggccagcactagagtatcacagtgaacagggtgacaggattgggagggctgtagaatgcttctccacatgcccaaagggaagggtttagggaggaggaggcttgacaggacaacactctcattattctgagtataagcgaccctctcagtaaaaccaatgcattgtgtttcaaacatacatttttatccatcacatgagttgctaaaacttctaataaaacatcagctatttgtttatatcttttattcttttttagtgagtggacttagtcactttactataaacctgtaaagattctttctatgctaaaggtagtatctacaaagatgtgacaaatattttcccaaccgtgttttcattttggtctttaatgcaaatgtttctttccccacttctggtgagtgttagtagctatgtactaactttaatacattttgtctagcctccctgaaaaggttactctttcatgttagaggctgcaaaactgatgcttagggttgtaatttgtccaaagttttagcgacagtataaggagttgttaaaatccccaactcatctactatctggtgtgggtaggagtgcaccttatacatttaccttagtcagtgaaggcagagaggagaaggagttctctgacaattgctttctaggctggaaggggttccaaattcatttatttagtcatacattcattcaataaataaataaatgaatagatgctttgaaataacaaaagagtatacagagaacaacaaagaatataaacaatattggatacagtaagtaataaacaaggctgctattcacccaagagatactatctaacaaaattataatgtatcctgaagggaagataagagttgaaaattattatcctagcaggaagatattgtgcttttattatatgcttacctgttgagggctcaggcagccacaaatagccttccattggctgactcttgtacttatttgtgaatgttggcaaacctgtgtgcttgtacctttgtatgcatgtgagtgtggaggccagaagtcaactttggcatctttttctatcgttctccaccttgtattctgagtcaaagtctctcactggacttggagctctgtgattcagtagggctggccaaaagaacctcaggaatctacctgtttccttctcccatgcaggactagggctacagatatgtatactgccatcatgtccagatgtttatgaaaatctcctatttatttatttatttatttattggtttttcgagacagggtttctctgtggctttggaggctgacctggaactagctcttatagacctggctggtctcaaactcacagagatccacctgcctctgcctccagagtgctgggggttttatgaaaatctctttcttatagatgagatattgtagttttgagaaaatctataaatgtgtatgtttatacgcaagtgacagaagcaggagctggatgccagctgttgacattcccactcaggaagcacctagaggaaaatgtcctgaagaactctggactgcagcaaggaagcttatttttctactactgtgcatctgcgtgaccttgagtaggctacccaccctttctaagcctgggacacttgctctgtaaaatgcagacatgaaaactaaccatggctgggaacacaggacctccctagcgtgtacgaggcccttagtttgattttttgtacctcagagtaacaactccacagagaagccacaagaaccaagaaggacaactcacataatgctttgggagcttttggaaacagactttactacattaccatggccagcctggaactcattatagggctcaggttgtccttgagcttgtgatcaaaatcagcctcttcagtaacaagattatggatgagaatcaccatagctggctaaaggctggattgtttgtttgttctttatttttttgtgtatgtatgggtgttttgtatgtatgcatgtctgtgcactgtgcatgcacagtgtttgtggaggccagaagagggtgtattggagtgacagacagttgtgaacttccatgtagatgctgggaatcaaatccaggtcttctggaagagcaaccagggctcttaaaggccaagccattgctctagttctccttctgctttgtagatgctgggaaatgaacccacagctatggacgtgctacacaagctctttattactgagctagagcctatatctgatgttaagtttgaagcaatgtgtccggaacacacccagaatttcctatgtgttaacaactaatattattattctccaaatgatcagtcttgtgatttagacttacttgaaccaatggttctcaatcttcctaatgctatgagcctggagtacagctcctcatgttgtggtgacatacccacaaccagaagatcatttcattgctacttcataactgtaattttgctatggttattaatggtaatatacatacctgacatgcagggtatccaatatgtgacccctgtcaaggagtcatctgaccccagtcgagatccacaggttgagaactactgtactagatgatgaaacaccctctgattctacttgccatgaaaatgggcaggagaagggtctggtgtcctgctgctctgacatatgttcatcatggaaaggacatattttgagtaggaatgggagcttaactgaactgcataagcccgggtggctgggcttcagctgtcatatacacagaggagccttggccaacctccagaatgaatctgcatagactgttattctgcctagaattgcctattaacacaagtgtctgaagagtgtgcctgctatttccgaacaatggcaccaccaatgagtgtcttcaaaatcatttggagctcaaaaaacccaggaaaatgtatcaagggatcaaacaggtgatgtgtccctgccttatttctgctcccttcagtgtcactctgtgaatggcatcttgttagacaccctggctgtagagatagccaagaagaaaaccatcagcccacaggaagttcagacccagcatgtctcaatttgtgtttcaatctaattttgaattgctcatacccttggtgagagagtcaaaagttctggaagtcatatgattgtattttatttgcctcctggtttctgtaaaaagtctgagggaggggaagaaaaggagaagtagaaaagacaaatgaagggaagatgcacttaaatagaaattatatacatataatatgtatgtatatattcattgtaaaaatacaaaattttattaaaagattataaatatgccacttctaatcaatcatgcatttcattttctactattaagtagaaatgtcttggatagccacaaaagtcacataaaatatttaatgaaaaggtcagaaataatttcatgttgtattatttacgatgacttcctatatttcaaggataaaactaaaacagacagatattgggactctgaagatacaataaacaattgtaaaaccttacaaattaaagggaacttaatgattatttcaataactcaactcacatatgctttgcttgatgtttaactcagactttaagtgtatcacacaaaagctatgtagccactaacaagattctaaacaaattgattaagaaagcataacagttttccacaaatgatctaacctggaaatcccaacaacttaaaggagaatagaagccaaggcccaaaataagaagtgtcattgactggcaaagctgtaaaaacaaaatgtccctgacaatgaccacttctacccccaacaacaggacaaacaagaaactgcaagtgtaattattaagagggaagagaaagaccagaatggagaaatttgagaacagccaaaagacacataaatataatcccacactagccttagctattcaatgggtatgagattccagagctgtttgagacactttctcaaaacaaacaaacaaaaaagttgaggaaataagatacatccagtagaaactgccagcccagactgagagatggactcacagccaggtccttcattcagtctccataaaaagggagcctaccatgtcccagatattactccaagactgtgagatcagttagaaaggccaagcagacctgctttgagtattcctgcactcaaagcaggtcatactatcagggaagaatgcaagaaagcaaagcaggtgttgtaggataagcctgtaagtgctcctgcagatgtagaaaactggatgagcattatcattaaattttatcctcaaagtctggaaaattggaaggtatgtttactaaagtgccatcttatttgctttcccattgttgttataaaacaccaaggcaatctattaaaaggaaagtggttaatttgggcttacagtctcagggtaagagtccatggtggaagagtacaggcatggtggcagggacagctgagagcttacattttgatccagcaagtaggtgccaggatgttgtgatcacacaggtccttgagctcacagatagcactagggaagtcaggactgttaaatgagcaaggttatcttttttgaaggaaaaatgtataactggttttctgcctgggagactgggaagtgacatgtactttaagaagaattttgatgtaataatgcttccttatgcacaggggattgtgttacaccaggaaacttgcccccaaattgtactacacttaaatatgactacaataaacttcccagtgtcagactctagaagttttgaaccaacatcccatactgaatcatgttgaacataaaattccttctggtcttacatggatggtccctctgctgacctggtagtcacagaaacccctacattaggggctggggcaagctgaaaatggcaccagtgttttgaaacctcaaagcacacctccagtgacacacctcctccagcaaggatacacctaatcttttccaactagggaccaagtattcaaatatatgagcctatgggggtcattctcactcaaaccactgcattcccctccctggtcctcacaggctcatagccatatcataatgcaaaaggcatttagtccaacttcaaaagtccccatagcctttcagtctcaacatagtttagaagtccaaagtctcttctgaaaaatcaaagcaatctcttaattataatccaccataaaatgaagaggaaaattatatgttcctaacatgcagtggcatagaatacacattaccattccaaaaaggagaaaatgggggcataatgaggaaatactgaaccaaaccaaaaccaaaacccaacagggaaaactccagattctgtagctctatgtctgatgttagaactcagatggcttactcctgcagctttgctgcctgagacacacttttctccctcaagctggttccactccttgtctgccgttctccttagaagatggcctgtagctctggccatctccaacatgtaggagtatccagcacaatctaagtttcattttcacagtttcatacagtgacttctctgggcctccatgaagggaatatcctgccaaaaatgtagcctcagtgactctgctaatcacaaaggaagagtccatgagcctgccaagttctattgtccactgggatggagcctgacactcccaccacatttgcagcagctttcctttgttgtgtgtctttttaggagcaaaaaatggcttagatcttttctttccacaagttggaagcttagctgggtggggtcttaccttgagggcaccctttgctttattctagtttgaatcaggcctgtctttaatcttctcatctctttcatcttaagccttggccccaacattaaatttcgtagagctgtctttcacctcaaactgtatatttttcatttctttctgctctatttgttcttttttattattgatctgcataagagtgattactaataagcatccagcaaagtcattattaggctctctctaaacctcctccaaggaaattaattagtccaatatttttcagtttagcctcagacagagtcttaaaacaagggcagaaagcagccactttccttaccaaattatgagaagcattgtctctagcccaattgctaatgtcatatccacctgaatcctcttgaactgggtctccatagtccactttgctaatagcactactatttttcaagctcctactaggatgatccattaagtcccacttatacaatccaattactttcctatttcaaagtcccagagtctttcacatttctcaaagaaaacaaacccccccccaaaaaaaaccccagtacactcaggtctgtctcatcaatagccccctcttttgtaccaacttctgtcttagttccttttctatcgctgtgataagacatcactaccaaggcaacttaaaaaaagaaagtatttaatttaggcttacagtttcagaaggttagagtccatgatggtggagcacaggcatggtggcagcaacagccaagagcttacatcttgatcagcaaatagaggcaaagagactgggaatggtcttttgaaacttcaaagcctgcccccaagtgacaaaagtcctcccataagatcatgcttcctaatcctttccaaacagttccactattagggggccaagtatccaaacatatgagcctatggtgggggggcattctcattcaaactgccacaactcattcttcctttctttaataaatctgctctaccattaatgtagtttggtaccatgaagtccattcattaatgtgtaaccaatctcccgagaatggaactcaatacccattagacaacaatctcccattttatagtcacatttgggttaactgaaaccattcatttctagttccaagaacttgacttccaaagacaccacatacaaatggactcctacagtatccatacttctgtgattgacttgtttttacctagcataagcttcatccaccttgtagcatatgccagagctctctttctttataaggctgacaccactctattgtacacatatatcatatcatgcttacgctttcatctcttcatggctccttgggctacttccaatttaaatagtgctattatgaacatggcaaacagtcatgaaatttacagagtcggttttgaatgacttagcgtaaagaaaaaaagctaaaacagtctgcatccaaatattcttggaaacctactccatccgccacaacaggttagccttcctatgagagcaccactatgaaagcatccttaagcatgcagcctggccacagatctgagaggtaaaggctctcaaaataaatggtgtgggtagatataaaacctttctctcactgaatttggctttctctgactcttcttcattcaggaaatgatgagacccccaagggactaaaacccagagagactctgagtctagttttgctgatttgctcagaccggccatcacagtaaggagactttacttatagagtgatgagaacaaaatggaaggttgctgatttccagggaatattcatgagcaatcatgatgcatcacaaaattggatcaatgtgcaaaattcatgtttgtcatgactgagcatacagagtggaactgtaggtctgaaaaggaacacttaacagggaggatatgagatatagaatgtgcttgtggagggggcagagtagaacttgttcaagttgagcagaagagaagacacattatattcaagaaaaggagtgtatgtatctcagagtactaaagcactgtgattccctgagcataggaacccaggatggccaggcagcaaaagccctaacccagttagaggacaaacaaaagaattgttgctcgctctggatacttttctaagtaccataaaatttagttgcaattactttaagattggcgccaccttgtttaccacagtttgtattttattaatactgaaacacgatgtacaaaatgctttagagaggtgagtgaccacaaaggagtcggtgaaacactctcccggggcctgtattctcctaacagcccttataggactaacgttcatctggcatgtcacggaactttagaactccagcccagccctctttctctctagcaaagacatgattggtaaattatttggaaacagaaaagcaaaatgcaaatgagatgatttttaattgtcatttatggatggcaataattttcatattattttatgccatttatgagattcagaaaatttaaacagctaaatttatttttcccactctttgttgttacttttaatcatcacaccagtgctttatgtgcttgggcactggactattcatgtctgtgaggctaaaaatcttccatatcagtcactgcgtcagaaaaggaagattctgtagcctgtcctgggcaggatttgcctctgcggcaagtctgaccctctgtttcctggattgacagaggcgcacaggcttcatctatttaagagtctttgtacgtgttggattgtgtgcatacactgtcaagcagtggaaacaaacactgaataacatatgaataaattacaagatctgttttacacttaacatttttcaaaacacacctcctgctgctaaagcccatgccccgtaaacatctccaggaaagctgtgatagaagcaagaataacaatcccagaatgacaaattggctagacagagcgaaggcaaaataataagtacttctatactagtcagatgggaagctacacacacatgcccaccaacttgcctgcttttgtagctgcttataaaacatgctttcatttgtgttcagaaagaaatatgattgagacctatgagccaaggtccaatacttacctaatatgtatgttaattgaatgataattctacacacaagagtattacattaagacaacttgaaaaagaagatgggcacatacaattttggaagatttttactctttgaaaataatagcttcaaaatcttagagatgaatgtttctcttcctatggccgatatgagagattcctggagctgagtgtgattgacctggagtcctatagctgcccttgctcaactctatgagaaatattcacagttacattatcttgtacatgaaatacacattaaatctggtcacataactgcttatttgaacacacaggaagaaagttttgctagccccttcacttaaaataattccatttaatcttgattctgttcagtcatatctcactctatttccagtttctagaccccagtgtcatttcctgcatattttctttttttattggccctaaatacattgagctgcctttatttatactttaaaaacaccctccagcactaacctcaggcaaaaacaaatatgtttttcccaacttttaaataaaaataactcttaaaccaaaaaagaaaataatagtttcataaagagttgattaggatggaatattggaagactttatttaccccatagaccatacttagaataggaaattgatctagaaagcttaacacggatacaacaattcaacatcccttagcagattattaataaaaataataaaaaaatctaatcagcatctttaatgtcctaagttgatggtttctttaataagactatctttaatagacaaataacaatgcatttttaagatgcatgactatagcttaaatatgttgtcaaaaccatttagaataattgtagacttgaatgcaaagaacatatccatcttttcagttttatcagattagaatttattaattttcatttatcaatgtaaagcacatctagtgataaacccttaggaaaccatcctgtggattcaatagcggcagtttacaatgattcagaagttccccaccacctgctttctgtagctctgactgtcataagagaaaccagagaagaaagcaaatgagcaaagctccttggcttctggaagcctcccttgccgtgctgaagcagtactcagcatctgacctagggcatcaataaaacaatgaagacgggactctttcagaggcacataagtgtcatgtcattaatcgaacttggatcgcagcctcctattcttataagatgacaaattaaccatatggctacctcatagatgacaaaactaaaatacattaaactctgtggggtaaatacacccacaggcaaatctaatatactgacatttttaatactaattgaagctgattgatttacgtattctacgttctcaactctccaaaatgatgtatttaatgttttatttttaaacacaattaaaaaataatatataaatatatacatactgcaaatgtaatacagataacaaattcatttaagcccatttatgcacattagtaacacaccatgtggcaggaagactaggactacaagaagaccccttggcgatttattttatattaaatccctaatggcctcttcttatctttgcaaaaatatgcacgaaagtccagactatgcagccatcaaaatgaatggttatttatttgctaaacgagagccctatgtttaatgttccttatacataaggtatctggaaaagtcgcattcctacagctccatacatcatttattttacataccctaacttctcacaacaggcagcgcaaagatatctccgaacagcgttgtaagttgctgcgatttttgtttccaattccattactggcagattatatgttaacatgtttacttgcttctttaacaacaaaaacaaatttatagaccatctttgtgccttacacagacatgaatacaaaatgggagaaagtttgcaagtgacaaaaacaaaacaaaacaaaaaatcaaacaatggatagacagcaaaagttcaagcttgaaagtaaatctcgagtaaatgccaaggacaaagcttcacatatgataaaattgcctgaaaaagaaactactagtatgcgtcaagttccaacagggtgttctttggcttttaaggaaaaacggatcctttctattgcacctcaaaactttgcactgtgggagtttgaagtattcaagttgacagggacacactttcttaccaaatcacctcactgcaggttcacacaaccaaaatgtgtctgtctggcgagcccggggagattggaggtatgaagtaaacaaaatactgttgcttcttccctccctgtactgtctccatctaaattcagaacaaggacaaagaattcacacaggaacagacacttgacagagagtaatgtgtggaactgggaaaggctaaacccaccctctttgtcttagagaaagaaggatccccctttatccatagggtacctgggagtcttcctgagcccctctttgtctataggacatagcagtctgtcttccagtatgtggttttacttccatagtttcactaacctgcactcaactatggtttgaaaaacaaaaatattttaagagaaaatgctacatttgtgcaacctttattatagtatactgccataattgttcaatttgggtattaatctcaatcttttgctatacgccaattatataaatcaagttatcatgagtatgaatgcataggaaatacagtctatatgtgcaccaggcatccagcatcttgaaaagtatcatcctcaggtaaaagacactactatatttacataagaaaacaaggcagaatttggaggtgttgacatatagtcgtgttgtagagctaattattgacatgaccccatataaaaatttctagtaaaccctgttgtttctctggatactcttagttaacatagctctcatgattatttcacaagaggcttaatggtcaaaatatccaatcccatgtcactggtacaggtggagtcatgtatagagctatgctccaatctgtctcagccagactcattgctagttgaggggaacatggccttctcatatcttcaacaataaactaactgtagtctgggacaccattgctatgaagcagaagaaaggtaacaagccacacggcagaatgcagaataatagaaattggttaacttaagttataagagctagtgggacaagcctaagataaggtcaagaaatcataattaataagaagcctctgtgtctttatttgggggctggtagttccaaaagaaagtttgacaagaaagtccaactacaatatgagacccacatgttccaatatagcttctctcttttaataccaaacttcaataattctcttccctttaagatggtgacagtttaaagccatatattttccctgaaaagcttgtatccttgtgctatgattgaggtagaaccagctggaacctttatagatgattagtcatggagactaatccactcatggattgacaggttagctcaaatggcttcattataaaagccctttctgctctgtctcatagacactgccccatgtcattgatgcctatactgaaaggggaactgactctcctcagtgtagattggaagctgatgacacacggtctacttctctgcctccagaattgagatctgaattaatctcctctcaagagtgtgcagttcacggcactcacttatggcaacaagaactggaataagacctctgctttcaagcaccatggtgggaagggtcacaggccttcctgatgcatcccctgaagcacaggactaaaggtctcctggcaagaacttgcccacttgtcctgcagagctcgtctccatcttcctcaatcctgatccctgccacagacaaaggccccacagagacacctagagcttcttctggaatctgacctcttgggtgtttcagccaaaaaaatcatccagggatgttggggagaacttggccatttcattatcaaaatctcttgaggtcactgttttcaaccatattctccaaggctctgggcacttctcttttcctcttggccctaaggtggtaacctctggagtaatctgtcttcccttcaattctctcaccatgccttcaactaaaaactgacttacctcattggctttcctgaaattatcctaattggttgggtcacttattctgaataggaccatgaatattagcattatgtcttttcatgctcaaattctatcaatccataaataaatatgaacctcccagcttcctgttgttcctcagcctggcatggataacctgacctctcaagtatcttcttgtccaccatttcctgtcactctgaaccttcataaatcaaaggaaagctttgtggatattttcaaagtaggtcattaatggagatttaagagcctgcaaagagaattggagtctcagagctgcagctacatccccaaggcaaagacttagaaagtagattggtcaaaaagcaaggagcttgacttcatcactgttctctcccagtgtgctaggcaataggaatttcccaataagctcaacaacatttaataggacagtatttgtctatataaaaccctaaacaactaacacatttaaaaggtacagatactaccaactttgtgaatctgggcgccagatccatggattaaatatcctgggtttaaaatgtctgagataaaataactgaacatgttcagacaatttgcccatcacaattacctaaacaacgtggtatggtaattactgagatgatgcttatgaggtattataggttgtcagtagtcttgagatttgatgtatatggaaggatggttggggattatatgcaaagtctaccccactatgagttgacttgcctatctgaagatttgggtattctcagaggatcctggagtcttttcccctgggacaagtacagtgcacatgaaaaactagttaagaaaaagccaagggggctggagagatggctcagaggttaagagcaccgactattcttccagaggtcctgagttcaattcccagcaaccacatagtggctcacaaccatccgttatgagatctggtcccctcttctggtgtgcagatatgcatggaagcagaatgttgtattcataataaataaataaattttaaaattttggtcaaaataagtaacaattctgatatttcttcagttttcacttaaaaatagtttcaaattcactgctactttgttagtgatggaatcattttctgtctgaaaatgttttcagaatagaggctcccaatgattgttttacagagtttatcatcatgtttaggatgggctgactatatgccaggaccatgcgaaatattttctactgttcacttagtcctcagaggaaagcactaataagtttccgtcttatacatgagacactctatgtgctgatgtctgttgcttttccatcataccagttctaagctgaggaagcatgcggtgctcgtatttcctctgtgaccaagaagagctgtttacttggcttcaacatttgaaacccctggcttagtcagtgtgatctcatgcctcacagtgtggcattctgatgctggctgagaacggctgcatgaggtgtctcctccacccttccctgatgctgtgcctctgcctctggctggcagctaaggatgtgagccataaatacaggatccaggatctcacagtctgtctctaccactcccagctctctgcacctcagcagtggcctggtggtctgaccttggtctgcatttgttctccttggccaccttcccaggttttctgtcaccagctgttacttgtgttccctcaaccccttcccccaccttctctaccctgggaagtctgaaataatctctgttttctgggtcctatctttaagcatggataactctggatcaataggaacatttcagccttttccctggtagaggaagggagggatcagccaatgttttactaatgctggaccccatggtctcactagacagcctgtggcatgcagtcgtttctctatctaccttctgatttgctgatcacgcgcctgctgcactttggaacaccgtgctctctcttccagctgtaacatgtgcgcttctcttcatctagatctgtggttctcaacttaggcatcgagtgatcccttcacaagggtggcctaagaccactggaaataacagatatctacattgtgattcattaacagtagcaaattacagttataaagtagcaatgacagtgattttctggttgggggtcagcacaacatgaggagctgtattaaagggtctcagcgttaggaaggttgagaaccactgctctggatagaacactaggagacctttactttccgccaccggctcccagtctcatttacacaccaacttctacatgcctttcatagctttgtttccaattaattggggcacctttcctactgtgtattcctctcccaaatcagacaccatgtttccgtggcattcatatttaattatttgcaccaccgagagtgacctatcattcataaaggcaagggaacagagaccagtgcataacaggatcaaccctgcacttcagacacatagtagctactcaactaatgtttcatgaataaacgtctgtgtcaatgggtgagcaaatgaatgaatgaaggatgtgtgtgcattccagcccaatgatacaccaaccagttgctgggctataggctgaggtggcccactggtggatacaatgtgggtgagaggctcttttagctccatggccaggtagacacaaaatgaccatttcacttcagatttgagataaaaagaaagcaatttaaagttcagagaaatgaggtgtgcctggcatgagaatctgtgaagaaattaaaactaaatttcatgacagcattaaaaacaaacaaacaaacatgaggccagaatgttacaaggcaaaaagataaccatggtgcttaacattggaaacaacttttagaagagtctttcagaatcccccccccaaaaaaaaacaccaaaaacctgacatcatgaacttatttatttcaaagcttgtttttttggggggagtccagtgagaaaacaaaatgaaaagctcacacaacccaatatacgtatggtaacattcacagcatgttggatatattttattatatttgttttctaggtgtggaatgtatggtatgaatactagtattcttttttccaatatgaagcaaagttggatttgcttcatattgattttattaattaaaggtttagagtgagacaggggaggtacctgaggatgggcgtggcatttcgagagttgctacacagaatggaggaatactaagagctgcttccaccatcacaacctgctttcccttgtccaccactaggcggcaccactggcccacagtatgctcttgatgcggccggtatagcacccttggatcactggatgaagagcagcacaaggtctagtctttaaaagtagactcctttgtttgaccctctcagtttccctgagtcaccactcaaaaaagatttctttttgtgtataccaacatacagtatagttacttagggaaccagcttggtatttacacagaggggtgaaggactgccagctccaagacattcccattgtctctctctggtttttgttattcaagacaggatttctctatatagccctggatgtcctagaacttgctctgtagaccaggctgacctcaaactcagagatctgcctgcctctgtctcccacgtgctgggattaaaagcgtgtgccactaccaccctgctgtcttttgaagagatttctctgtcaccagaagaggaatacatttcttttccttcagcctggcaacctgcttttccacaacaagttgatacagtgtagtaattaaccattaaaacgtcacatgtgcctccctggaaagttacagtcaaattaatttaaaccaaggtcaggtttccaagtcggcaaaagaattctgaaggcaggtgacagggaagataaactaaagggaaagtaagcaacagctgctattaaaagtaactcagggcagctcaaaggggtctgaggacattcctaaaaaggcaattagccaaatcttttcagaaattaagccatcaaagtgacattacagcacacttcaaaaatgtatttacagagcaaaagaggagccatcccgacatagcagcatcatggccagaggggttcttttctctgaggaaatgtgtgtagacgagaattagatccttagctagaagaaacttcaaattgtcacaatacatttggggtgctgctattgcttaattccctcagtgctgacgcagagaatgaattaactcacttggttgcttctagtttctttgtcatcttaggggatgggttggatgacaaaagcctcctatggcactgtctcaggaaggagctgctgaaggcacaggaagaggaaaagtgtacaaatgctactctgaggaggaaagacaggagtggtcaaagtgacacagaaaacccaggacacagctcaaaggggtcctgagccctcactggcacaggccaccctcactggcacaggccatctttgtgaaagcttccaagaaaagctcacagtcccagagacattgcatgccccagggagggctctacatctccacctacagagaagagagcaaactgtggaaacaacagggcttctgcagcctgagtttccagcaggctgagaggcagctgtggtgtttggctccaacgaggaaaggttacaggccaattattagtgcaacctggtactttaaacatgaccagactcttaatccaaactaaaattattaacggctgaaaatacaatgcctttggccaaagtgcatggaactagctaagtaaatgatgatgataaattaagtttctatcttttctttgttaaaaaaaatctctattggtttactttaaaaggaaggaagggaggaagggagggagggagngagggagggaagaatcagcacttcagctccattatcttgtgaaagaatgtacttgtctacagttgcaggacaagcaccccttaaggtccagtggctttatgctcatatccaacaacacaaagattatatattaacattcactgtgggcacagggtagataagaaatagaacgttttcagagaagaaagtttgcacttaatggtaccaaaaaaaagtttgcaggcttgggtagattgtatcacacactggtcacctccatttcctgcccatggtgtcacatgaccccatcccctcacaccagggatcagagccccagtagagtgctggcatcatgttgtaaggggtggcaagggatgactgtcaatttcagaaaatatgcaaacccattatttgtgaattagaaacagccattatgaaaattacctaatttaacctaatcatctaaagctttcacttcttaacactactgtgttaagaatcaagtttcagtatcaatcttggagagatgcaaatattaagatcatagcaagcaaaatgatagctagggaaggaaaaaagggggttggtgccattaagggaaatccatttacagaggagagtgagatggaatgtgttttatgactcatgaatccccttttgaaactgacttaaaggtaaaataagaaaagtggtcagtggagatacattatcccccaacttgagcttagttggagaaacaaaataagaattccatcccaaagcaattgtaagaaagcacacttttgtggacttttagatacactgtagtttgaatcaagggcccatgcattgaaggcttggttctcagcctgtgatactgccgagagatgatggacatagtagaagaaatttaggcagctaagcatgtggccttgaaggtggtattgaacctccagctccctcctgcttctctctgcttcttggcctccccagggtgagcagctttctctaccacatgttctgccatggtgtactgtaccaccagaaacccttggtaccgtgagccaaaacaaatctttattccctacaagttgattaatcttaggtatttcattacagtgacagaaaggtaaccaatacactgttgatgctgtatttttggtcatagtcagaaagtgcctacatacagtctgcaaaggtcttaaaatgtcataacctccagctgcttcaagaattccttaactagtgcactctgatctgtctccaattgcttccctctgtaaggaacagcacattccacagtgggaacgaaaacccacattgccgggaccagtttccagttcttcattttgccatggtgctcacaaaggtataaatcattagcttgaaattgatttcaacatgccatcagcacttcatgtggctcacacagactgattcttagaatccctaaatgacagtcatccagccattttgtcaattgcttcaaaccccttggaattcttcagcattaagaaccatgaagctcaaatgcctcaacctacacagcattttgttgtttagagtcactaccaatatgcaagagtcattctattttgttttgataaaacaaaacaccaataaatatgtagtctgagcaggctgttcttcgtttaatatgctgatttggaaacgtactttgtagcaaggaagtggaattgtgtatggttttgagttctagacctgggctgagagaaatgagtctcagagcaactgagctccctgaagggggctcttcagtttctgagctgcctgcaggctgtgtagtgtgctccgggctcccagctttcgcccatactggggtgggtgattgctgatgaaactgtctttctgctttgatggaattcctaaacccttcctcccttgatcttgagatacttccctctttgtgaagtatgataagaaatgtccttccaggcaaagctgggagcatacgttgaaaatagcttctgaatcccctccagccacccaacccaagcaccacatgggattgctgcatgggtaagaacagacaactctgggttgagccttgaggttcaggcctgtctgctgcagatgctggagccacttccatcagaatagggacctgccatagcacctttatctctcggggttccaggagggttgaactaatggatgctctcaccgtagtgtgatgcacactgaccatgcatcactacatgctgccttttacagaagcaaggaccagctgacagacctggactcagaaggaaatggaaacactcatcatttagaacctggaagtgcttagcaggccagcacctggctaacatacatgaggtcctgggtttgatccctagaaacacgcacactcaaaagaataacttctataaatgacagcatggtaagcattaagtttcaaacctaggacaaacagcagaggtgcctgttaaatatatgaaagcagacctggccactaggttctcttgcatccctcagtctctacctgttacagggtaagggtagcatacttcactttctaccctgaactctccagtctagggactgggctgcccttgcccccagaggctcttccctacatgatccacacattggtatacccacctcttcctttttgggctttgggcctcccagctgctataccctgttcccctctctccattcttccttcccccttcccctccccatctcccacctagtccagcttagcctggtcatgtccactctagattccctctctcacatatctacaataaactttctcacatatctacaataaactttctccatacctaggagcatcatgccctttccttgcctttatttcttgttttcattcaataggacctgggcaggcttgtccatatagttccactggttgggtaaaaaggctttggagagtcatttatttttttcaaaaactcttcagtatttattaacattttgaaaaatatgatggtcaaaaactgtttccctaaaagaaactatatattttattataaaatacagcaggtctttcatcttgactttaaaaagaaatatctctatctatgcttggacaatgagaagtcatcattggtgcctaaagaagcagagatttcagaccggcttgctcagtcttaaatcactggttatgatgggcatttacaggcctgaataaatatttgtagggaggagtggagggagagtacgcacgcacggtgttccttccgacctatgctctcagtgctaatggaaagtgctgccggttttcccctctgctgtgttccaaggtgatctccatacaggacagatgagtcagtgcactgagtcactccgtcacaatgcagccctggagctccctccccctggtttcaaatagtagggctctggtcaggaggactgccccagcttctgtagaggaatgatccagaacactagatctaaatgtggattacattttaggagctgtgatcacctgtgcttctcattcacagtgaactgatttgcatgtggtccatgttcacacggacaatcctattgtaagtcttattatcttaagctccttagagatctcatcacagtgtatgtccccatgaaacctatatgtccaaatcctaactggaaacactcagaacggggctttatttggaaacagatatatgttaaatgaggtagatagatggtgcctcatccattgtgacttatgattttaaagctgggatggggagagtcaggtcacagagccacacaccaatgggagatgacatgaagataaagctggggacctggatgatgttcccacaagccaagggatgttgttcattctcacaaccttcagcaggcactcatcctgcaagcaccttaatctgaggccttgagcttccgaaaccataagctcaccgatttcttctgaagcctgcagtctgtagactttgctgcacctttacatcagccctagcaactaagtcacagcacgtgtctgtctgtgtgcaaataaattctagtgcaagcccaccacccccatgcctgacttttgccctcacaaagtaaagatgctaatgtgctgtagccttcagggagatgcttaaggaagtgttgacaaaggaaccattactatagtatggccatgacccacctcagaagcttctcattagaatggaaagacatagatatcttagtgtactgctttaccagtgtgtgaatgaggcccaataaacagaatcatccgtggctcttccagcaaatgaataaggtaattttggttccaattcaccacatgctttaataccaatatattttcttcgatgggcaagtcagtgaccaatgaaaaggccctaaagatggcttgaataatcatcagtcaatgagctggatgtcattccttgcaaggtgcatgctgcaataagacgcaaatggcttggaggactgaaggcctttgcttccacagccctgtctgtggagaaggcctgttgctgcagctgcccaacttcaggtagggttttacttgtcacacctcaaaatcacatcaatttacaaccttgtatgttgggcaaaactctaaaattgtgtcattatagtaatgtgattttagggtagcttcccacagctaatattagcatattttaggttacagttatcacttgtcataaatctccatcaaaaatgacaaatgggatctataagctttttccttatcatgtagaacaccttctgtcaccatcagtggtttctacatcccatgcttgtggctctctctgtagcatattttacaaggaggaaagcttactagatttcttaatatttgtacccagggaaattaattggttcattggacaaagcaaggctgtgctattacataatggtggaattagagcaatgcaaaggaccatcaaacatatggagtgctttttctcttttccttgacatgctgcagagcctcccattgtcctcttctgatttaacagctggctagtttgcaaaactactcactcaatatttaggctgttgaataagctgtaatgaccatgaatacgaatatactggtcatttaaaaaaagaacctgtctgatgttagctttctgtcatgatgaaagaaactggttcaaaggggaaaaagtgaattcaagaccaccctgagccactatgccaaaaaaaaaaaatggccagttggtggtggcacacaccttcaatcccagcacttggcaggcagatctctgtgagttccagaccagcctggtctacaagagctagttccaggacagcctccaaagccacagagaaaccctgcctcaaaataaaaaaagatgaaaggaaggaaggaaggaaaaaaggaaagaaatggaaaagaaaaacataaaaaacccaagaactaggcagaggcagagaatttaactaggaagcccaaggccctgggttcagtccttagcagtgtaagagtaaataaattcagaaacaaataacaaacagatataaaaaatcgcaaataaatatttatattaactaagcacctactatgtgccccacaactttgcccaaaagttgaagacgtgtcaaaatagcaccccaattagctaaaaataccatctaattatgattaaatatactaaaccagttcacacttaataggattcatagcacacatttaagtcctcagttgatcagtggttacagagactacattgcataagagctcagaggtgggtggtaagaaatggagagtttctgagggccatgaagaagtgtcaacccaatgtgaccatgcttgggagaaaaagcctgctttagaaagctgtgggaacaacaaagagcctccctgagaacatactcagatggggagaagactgaacaactatactaaaacaatgaagtctgggagatgctggtctttgtttgtaaagtggggtgagtgagaatcagaaaggaatgctgaaccccaattacctccaaaactgggttaggaaaacagcagtgtcacagggtgccttagcggggtgaggcagagggaaaaaattctgcctttagctatgtgtggggtttcaactgacacacttgattagtgagcatcgtctcttatggaaaagctgcagcatattaggaaggagtccttgctcagtctctcagctctccttagcatcatcactgggatgtaaatgcagacatggtgctgatcacatcccagcttgctttcagctggtgagagcttcagatgtacctgttcatgtacacaaatgccctctcccctcccagacattcacacagggattccagaattatacttaactgcctgattaattactggacctccatggaaattactgtcaagattatacaatcattccatctctggttctgcttgataaacatttacagtttaacatatttgacaaaaccatttatataccgctataatagaaatgaaggtagattaaagctacaataagtctatgatattcatagccttaaaataactcactaactacagacagttccctgagcaattacaagatgttctatgttaatttagaaaggaattccaaacaagccatttaaaacctaataagatgccattaaatgaagggggacaggggagggggaagctaaagaaaaccctaaggcttgaaccagtagaaatgattctcggagctactgacccttgcaagatccatgttttacttgggtttctagacacaaggcatatttctaattgaaggtgattatctagttactacgccccaaattgcacacattttttgtattggttcacacccacaactaattaggtggagcatttatcaatctgaaagtccatggaaactgttacattgatctacaagctacacattaaaaaggagcactgtctgctgggaagcgctatctatatactggtcctgatgccaccagcccctgatgctcacatgcatctatgggctgaaatgtgaggctgatccactggggtgaattcacagagaggtcacagaacaaataatctggtttgttcttgggttttctaaagtgtggacaccaatatgtatggcagccatttcccagaaatagacacactgagacagtcaccatcatcacaaagaagacacaaatagcaacataccattcaaaagacagattcctagctagcaaattttatattcacacacttctgaactctaccaatcaaagatgggtagatagcctgactgaggaaataaaacagtaaagaatatataaagagagacttccacaaaggcacagatgcacctcgataaaatatagctcccattagttgggttaattaagattaacacacaagtcgttgggaacccccaaagtagcccgaaaggtaatttaccaaggaaagacaagagtagcattcattccaagtgactcattaactgcattggcaggctgaggctccttcttaacactggaattgtcatagccaataatcaaaatggcatgtgaccaaatggcttacaaaaggcaaaccacaacttgcttgcacaaagaaaatatgcacgtgaatctgatcatgtatgttacaataactaccaaacacagacacatgcaaagggttttcactggtgttcatattgcttccagggcaacgataacctccatgccagttggacaagtagagaaaaccccgaactcactcccacgggagaactgtctcacacagcaggaggttgtactctgggtgttcagacagcaaatgtgtgaaatctcttttggctggaaaagcaccctgcccttacctccagcgtcatattcacagtgctgacagccacttttatttcaccatctgacagctcctttagatctttcaaaattgtttgttcaatacttaaacctgtggataacaagaaaaaaacactttatacttgggatccattataaaaatacatgtcaaggggttatttaaagaatttatcctactaagctcaacatttatagtatcatttttatcagtaataaatacatactaagtcaaaaatcacatttgtggtggcatctacatcgggtcagatgcaggcaggaaatagaatttaccccttctgctgcaaaaggaggttcttcatggcagggtgcttacagaggggtggtgggataaaagagagaatgaaagatgaattggccagagaccagcaaggagcaaaggcaagggagctaggactagagaaaagaaccttcaaggcctgacatcacagcaggagtggagtaggaaagaggtgcacagccctagttgccttccttctgccctcactactcttcccattgaccaaacagaagccagagtcaagggaggttggaacaagccacacttgggcattggcctccagaggcccagagcaggtcgggtggggaaggagtgggcagtcttaccataaaaactagccaagtaatagcccaaaaggtccaaattaggtgaccctctgtaattttataattgccagtataattttatatgaattgatctttataaatgtagctcatgaaactatcataattgagctaggtgtggtgttgaacatctctaattccaggccttgggaagcacaggcaagtcaatctctaagagttcgaggccagcctggtctacatagagagttctaggcaagcaagccaggttgcatagtgacactttgtctaacacaaatgaaagccatcttaattgagctggccacccctgtaacagtctctggaagtatgtgttactgaattccttacttgatggcaggaataatctaatgctgttgacagagtatttcaatgaaatctatcacaggcacacaagaacaggtatatctgaatgtttaactggccttctctgtggaaagattcactgcaaagccatgcaaagcacaggcacgttttctggatgtttatgaagacagtctactgcccaccctgccccacagtctactgtccatcacagcaacctggggaaacagatggctacttgacactctcatttgactcagagtcaactgtggcatgttttgatctctagagtacattgtaacaacagcagcctggggtggttgagagaatgaagggaggcatacaccactgcgcacccatacattggcatgcacccacactcatgcacaggtacttaactttgtacatggcagatgcagacaaggccctgccaacatccctaacctcgtttcatctcattttggccagcatcatactccactggagatctgagatctttgctggccactagagcctacttggaggattccctctcccctggactaggaagcactcactattagaataatctgctgatttaacaactaaacctagcttatggcactttgtttctgtggtattaacacaccgaccatgactaattttaaactgttaacccaatgatagccaacttacaaaattccaaaaagttaaccaccaagccttaggactaggacaacctgtgcccatccatcactgcactctataggggaccagggaaaaaactttgtaatttattattttccccttaaaagcaggccttctgggtttatctcctacccagccctcttgccacagctgtgtatattggatgcatctatctatggttcagtattctcatctgaaaagtgggatatcctgaggcttcagggaaggtcacccttacaaagttagactctcagaaccctgtgcagattaaactctcactgaaacatagttgtttattattaacaatagttgatcagattatccactgtcccaaaagcttagatttacagaacaatttcattggcttaaccatcatctctccatttcttctaatgaaatcagaatcacaaaatccaattgtgtttggcactgtcccagcaacattttcaaaacagaacttaatcagcaggtatagacaccatatgcattattagcccatggatgagaggacagagcctgggaaggggttccaacatcagatgcccacttttagaccgatagcacaaacccagaaactcctccactagcacagagaaagggggaagaaagttcgagcacactcagattgacctcctgaaaagactccacctgcaagccaccctcctggaagcagtgagagctggacagtcactcaccctgagcactgagctgggtctcctgcagcacgctgatgatatcatctctaggaggcagattgggaaactgttcttccaggatggagagaatgtcctcctgcttctctgggagctcaggatccatggtcatccacttgaacaggatgctgcctgaaagttatggatacaaatgctcttgaactctctgtccacaagccaagacaggaacaatgaaaatcaatgtcttcatgctacagatactgccgagggttcccactccaaggatgcggaccatgcccgctcagatgctctccaggaccccagcaggaaacaagagagagccccaaacctaatccttatcacctgtcacatccacacctgtgaccacacccaaaagggcgtggtcagtgctacaggtgtggaggtggatatcactacaattccccttttagtctaaagaagattcaggcttgatacaaaactatatacaaagatagcaaacatcaagtatgctctaggagaaggaaaggtgaaatacaccatttaagacctactgccagtgaagcaacatagaaaaataggcatgaactacatccagtcccagggtaaaggcataacagaaattactatgaagttgtcttaaactggaaagtttatctaggaagagagaacaataattgtgacagtgtaatcagtttaagtcttgcacctaatatttctatctaggaagagagaacaataattgtgacagtctaatcttcaacctcatcgaagacctaagaaggaggatggtaggaagtgcaaatgagtgacttccaaaaggttcaaacagaaacagaaacaacaagttacctagacagtcacccaaagtctcacagcagtgtaggggcaaccagctttggctaaggcctagagtaactgactgaccacacagaaacagggaggttgaaaggctgtctttccctgacttggcaaggttcagcagtcttctttaagtttatctcctgcaagctcagttaggacagcatgtccaaagttagcagttaaggtgggggcagttctttgcccaagaggccattaagtgaggagagaatgaacgccagaaggagtgtcatcagtgcccaacctactctcgggaatagctcagtgccaacaggagcaattgtgtctcatgtcaatggagtactaacattaaaacatttaaatgccatattcggcaggtctatgaaatgtttgaagctcaaatatctatgtctgactaatcccatagatataagaaacttgggtaattataatctgcactactcataaacagttgtacaatggctgaagcttcccaaaatactttagcaaggacaatgactccaaaaaaatctaactatatacacatatataattctcaataacagagatagaactgaaatgtcttgagtagaggtagaactgtaaagtgcaacaaggtggatatcactacagtgcagagcagaaatccagtgttcctgactgcttttctatccaagcagttgccaattcagaagttgtagccactagacagagaagcctgtggacctaacaacaatgttataaggccttgtagaaagctgtcagcgagagggagtcttaacctgaagagctaccaatctagctaactgcttggtgttataaacaaagtttatgggaacacagccatccctgataatttatagagtgtttataggcaggcaggcaggcgggcaggcaggcacacacgcacacacccacacacacacacacacacacacacacatacacacacagagatagagggagagagagagagagagagagagagagagagagagcctgaaatatctacttgctggccctctttgggaaagatttgccatcttctgccaaggagaaggataaaacaaaaatagaccatccagtcccttccactcctccagttcctctgaggtgtgaaaggaagtccatgtcagagaaaaagaactcaccatcccctcaccaccttggtgctgtctgtaactaatgttcagccgtcacccaaagggtactagatataagggagctaaaaccaggtgactggaaactgttgggggaaaagctcaggagaagacaaatggagcagatccaggagtaataagtgaaactagctggagaattggaatctacatgcaatccaacgaacatttaaaactctggttttaatggctgggcttaagaatcccaaaatgttttccacagtacatcagatgtgatggggaactgaaaactaagtcagaagaaaatatccacactgaagcatggagacaaaaaagtagccaaaactccagagaaaagtttaaggacctaagaacatgtgactgctcctgcctggaaagggagagagaggattgtaacatttaagaaaaactacaaacaaaaatcagggctaacataaagtaaaacatctgcaagcaggaaaaatgctaaaaactacatagaaaaagattaaatccgtgagggagaaaacacactactactactacaacaaaactgcatcgaaacagaacctggtttctcagttaaaaggatgatgtcagaagagggtgggattgtgtcttcaaatgcagacataagaaatcaccatcctagagccttatattcagtgaaaatgtggctgaatagagagacatttctaaggaaaaggcagaaatatgtcacaagaaatcctactctgcaataaacaagaaggcaaaagacaacgatttcaaacagaagcaaaactaaataccagaaagaagaccattctggagatagaaatatgtggtcagcatgaatcagcatttgctgtatgaatggtaatggtatcttagagaattagagtagatgctgttaaatacatttcaatagtgatgagctgaaaaatgggttaaggagagaggaggaggaggaggagaagaagagggagatgggagggagggaagggaagaaaggataggggaaacaggaagagagggagaagtgaggaaagaaaatggggaggggagaggaaggggaaagggaagagggggggaaaggggaagaattagaactgcctttcttcttataaggtgtctgcaaaagccgtaaagaatctaccagtgacatgagaatagttagtaaatttaggaatttgttgtctaaggttagtaacacaaaactgtatttataagaataatcacaagggctggagagatggcttagaggttaagggtaccgactgctcttccggaggtcctgagttcagttcccagtgaccacatggtggctcacaaccatgcgttatgagatctggtgcccttctggtgtgcagatatacatggaagcagaatgttgtacatatatatatatatatatatataatatatatatatatatatgtaaacaaataaaaataatcacaaaagattaaaagctaagttttaaaaatgtattggcatccaagcataaaacacttagaaataccctccacaaatatatgcttgacttggtcaaagaaaccactttgctttgatttgaggatttcttcattaattttttaagttggtaaaatgcataaggttgcagtacaataataaaacttttatcttgatagaatttaagaatgtacctcaatattgttaagtagtctacatggtttgtatgtttcattcatttttaaatgactgcaagaacaagcattatacagtggtgaataggcatcataataaacagtgatgataaatatgtagtgctatgcttttatcaaagtattttaagagttaaaatacattatttttcaaattttataaaggtaaggtaccatttttacatatttgcataccacccccactccctggggttgtgcttaatagaagccagctggattttcagatcttttctatgctcagcatactacagagtgctatcctgatggaagaatataaaaggaagtcccctcacagacagatagaaaaaaataaagtgcactttaatatttgctatagacaactgtggatttgttgtgtggctgagagtcttggttttaaaacacacagaagagaaaggcagcgtttaaagttagtctaaaagataaccaccttaagcagaatcccacagcatggctcactgagaacgactcctgtccctggctgattcagtctgacttgacaatagcaaggatgtaactgcctacaaggttgacagtagcaagggcgtgactgcctactaggataggttaccctgttcaggcagatgcactccacaccctgagttatctttcctggacaataaaggctatagaccagcttcatctcaggactcttctggggacttccactcacactggaaatgtatttatattaatttttaaaactttattatttaaacacttgcaaataaataaaaaacatcacatacggaaattaaccagacccaaagtctgtacaactccataaatttctatgcagttacaataggtattacgaaggggatctgaagctaatttttattctggttctgtcttggattttttttgttttggtggtagataagtgcataaaatatatttgatattgaaagtataaaagttaatgtgatgctccactacctctgttgtgagtgcccagaaatacatttagtaattatataattttgctaagcattggtatcaagatacatagtagccaaagacatctgtcagtacactagaacctggttccagatgagtgttgacttaacttctggcaaattctgagcacagaaacaatccataaacctatacccagagtatctcaatattgacaggctgataagggggagatagaattaaaagtaagcaacaaagaaagcaattgtaataaaatataataaatgttttatttctgtagaaaaaaacaaccataatatactttgttcaaaagaatagggatgtaaagcgcctcttgctaatagcaattgtagcattctaatactgcacactcccacatgctaacactacacacatcctaagcaactgcaacatgccaacactgcacactccctaagcaattgcagcatgctaatactgcacattccctaggcaattgcaccatgttaacactgcatgctatctaagcatctacagcatggtaacactacatacttcctaagcaattgcatcatgctaatactgcattctatctaagcaactgcagcatgataacactacatacttcctaagcaattgcagcatgctagccctgcacattctctaagcaactgcagcatgctaacactgaattccatctaagcaactgcagcatgctaacactgcacactccctacagcaccagaaattgggaaacagtcagcatggggaattggagtttttatacatgatgaattcttagcagaaaaaaaagaggagcttaaatgtcttttctgtttacctgggaatgatttttcatactgaaagaaaatattaaataatgaataatagaagtaggcagagaaggaaaagagaaaggagaaaaagacacacactataatccccatttgtttaaaaaggtacaaaatacaacccttgaaaatttagaatgtctgaatttaagagaaaggctacctttgtgtggctgaaaaagaaacaccaggactgaatagttacttggattttctagaagaaagtagattttctatttcctaccccgagcctcttccgaagcacagcaggcgacataattcccgtggatgtcataaccatttggaagtgggatggatgattcaccctttgggcaagaaaggaagaaaaaaatcctccttggctctgttcctttcccatttgacctccttaaaaggaccattttgaaactgttaatccagcctaccaaaatagctaacaactagtctttattaaaggtcagttggcatggccagtggaacagagagttgacttctgaggacctgtgcatgcctctccactttgtcctaggctaagaacaatagctggtgtttgcttttgtcttcaacttatggctgctgtcaaggccttatgcaaacaaacatgaagggccatttgggcaaagtgtggacttgatggtagcatgcttggaaattagtgactgaaatctcagtgccagatggttccagaacacacacacacacacacacacacacacacacacacacacacacacacactcaatatgatgattcagcaatttagtggatcttagagttggcagccatcccctagaatacgtctctgaggaaataaaacagcacaggttgagcagtctgatgggtttgtaaccatctttggcacaaacccagaacatgaccaaacacgaattttagaccacaaaatgtgacattagatgtgttcacattggccatgtataataataataataataataataataataataataatcttccagaaaggaagggggaaagaagtaagaaaaggagaaaaaaaggggggaactacacaataaaaacaaagacagatgagaagggagaagccaaaagatagacacatttccaagaatcaaggtcagtgatcttaccagaatgacatctgtgtcttcctctacatgtaatgtcttacacaaataattcaaaagtaatacattataaatatatgtctttctggatgaactagatgttaacaatttgtgccctgaaatcactgtttcaaattaagacaagatgcagcatctctgagaggttcctgtttaagggctggcattctaatctctgcctgcagctactgagggtgcaggcaggaagaaaagctgggttcctgctgcatcacacctcccaaggagaatgaaaactctccccagagctggaggccaagtgcctgagaaagaagcttatgcaaaagatcctgtgatgggcagggagggagcttatggacaaagaaactaagcactagcaccaggaagacagacaaatgtacagagctgagatttgcctggctggagacaagaaaagctagcaacctctgtacctacttaggtgatgcttcaaaggtggggaggtttctttcctttctctggctctttggtgacatcattattgaattaaatgccaaacaggaggaaagaccatatcaataagaattgctttgacagctcccactttgaatgtgggctctctgggaaataaagcttcatctgtgtgaagaacctgactcaggaaatatgtgctattcaaaaacactgcaaagaagccaatagaagacaaggattctggcacctaggatgaccagataggcagactcactagaaggatgatgaactaaggtgcctactgtggtgttgtaatttacctagttaataaagtgacagctattttaaaagaagagaaattaaattcaaattatctcaagatggataaatactccaccaaccttgaaacactgcctttgcactaacttacttggttagcacatatccttaattgtcctcagggctgaaaggctacagtgcaaggaaaacagacagcatgataggtatgtgaatgatctcttaacaatacccagagcaatcaggttctacgtcaatatttgaatgaaatagtatagtatattgcaaacagtttgatagctcattacagtaggaagccttacgaccaaggagatcacatatgattgaatctgaatttgtattttgttttgagagaggcatcagcagatacagatgactggggacaggagagtagtgtcaggcacctttttgagaggactgatgaaaaagaacaatcaatctttaaaatcagtttgttccttttaaaaaacaaaggaactaaaagacaattactctgaataacagagatagatatctatacacagtaactgtctttataacaatgtgaatttcaccaggaatcacatttctgtcttcatttgcttcaagaagctcacatccaaagtttgaaaggagatactgttgtcacaccccccacgttttatgtgatatcctgatcttattctttcctccactgttctttctcttcgtactgttgctgttttattttattatgtgcttttttggtaagctacttcaaatattctgtgcaagaaggatttgactgacaaaattggtaattcatagataactggcctatgaaagcacacatactaggtttaaaatgtacaccgtatgggtccatttatgtaaggcacacagccacacaaaccccatgtgaagcaatttgggatacctacatggggatggctaaaatatgaagaacagcaaaaggactggagagatggctcaggggttaagagcactgcctgctcttccaaagatcctgagttcaattcccagcaaccacacggtagttctcagccatctgtaatgagatctggtgccctcttctggcatgcaagcatacatgcagacacaacactgtatacataataaataaatcttttaaaaattgttaaaaaagaaaagcaaagaagtatgtcatgaattcagaatgctggctacctccaggtaggatacatagaggttgtaggcatgaggaggaggcaatgtcttcacattctgcttctttagctgggtaattatcaaagggcatttccttcctggtgatatgctgagctgcatatttatatttttatagatatattttgtgttttttctttagaagtactatgatttgaaaggattaaaagtatatatatgcatatatatatgaaatcttaaaatttttacatatgacaattgatgaaaacaaaagcaaatactgcaaaataataaaataaatcccactaggatttctacaagattaaaaaaagacaataaggaaagggattattagtggaagaaacactgtccatattccagacagtaagaatattaaaaggataggccacaacagcaggcaatttcaatatcagacactaccacaaaatcaacgaagccatgaaaacagaatataaatagtatgttttaaatgtcaaactctttattcaaagtagtttttttcattcaagatatgctgattatagttcactctcccccaactcctcccaggagctccccacttccctacccactcaaacccacttttgaagagttcatccacacagttttactatgcaccaggcaaagtggaggcaccagggcatcaggcagggtaatggacacagtatacagtctctcttttcatgaagccgacattctgaatgtagggactgctagaaaaggagtagtagatagataggaacaagcactccacagggaatgctgagagtgagtcctccagaatgagaaaagttgggaatatttaaacaaacaaacaaacacaaaaaaacctcagggtgggggcacacctcatgagaaaatggatgcttaaagggacagaggaaaggctgtgctcgtcataatcatagaggacctgaattctgaataggatgagttgtagccagggaactgctcatagtcttacttatacctttttaaaagtaactgatttttgtaggaaataaagcaaagccaagcaactatggccttcatcatctaacagacaggctgctggccatcagcgaaaacatgaatggagaccagtcacaacataggtacaacctggttatgaccaagctggaaagcttgctgatgggccaatgtggaaggtgtgaaaaagaaagaccccaggataattgcttgactgtgacttaagcaagtaagtggccagcatagctctgaaattaagtggaagaaacacataaaactacgccattgtgtataggggcacatacctgtaatcacagcactcaggaggctgaggcagatgactgccatgagttctaggccatcctgggctgtataagtacttatctagaaataaaatcttgtccccatcttttacacatgaaggtatagactgaaaactagtttaccctctccccagtaggaagaagcacatatagtcttctcagagaatggagggacagtttcttagcccacctgaaatccatgtgacatgatctgggtgtgatcatgggtgtaagaagcaaaagacaatcaaattcatatagtattcaactccctgtaaatttagaattttggtacaaggtttataatagtatattctccatttctattgtaagtttttagtctcttctaagtctcagccataagtatctagtcttgtgacatctaagagagtaataatttctcatggccaagcgtgggcataaaaaatttatatttaattttcctttgtatttttaagatgtagaagagtacatagataacgtgtctgaaaaatgtgtcaagttcacattaaagtaacttcacagttactgaggaagactgttttgaaagattacagttcccattgagaattaaaggatgctaacaccacttagaggaagacagaaaacatgtcctttatactcgatggtatatatgattggagaactatgaaatctaagtttgacttcagtgaacagagaaaactgactcaaattctttcttaaatatctaaagatttgagaactttacaaaattcatctattgctccaaaatatcagcaaagtcgtgtgactctgaacatctgaggcatctcttcaaaggcaggttgtttggttccccatccttcagttccctccgttagaggatgtttcatctcatctccacatacatgcacataagcagcacacagaggcaccctggccacaggtttctactaaacatgctgaagggacaactagaagagtagttgcctctagttctccaaatctgagcatcatcatcaccgccatcattgtcatcattgtcattattagcagtagcagcagtgtaaccaaagtacatcattgtactgatgtgttacagcttcatgttatttttctgtttgtaaaacctcgtgatgatgagttctgctttgactatatcttctcactaataatgtgtgtgttggacttttagaacaacaagctactcagtttctaacatatgtaaacaacatgttttttagtgcttgtctgaacaacacatttgaattgctacacaactttccctaagctgagattcctgattgcttttattttctgtctgctttaccacaaagaaaaacgattacaattccttgggttagccgaaggtaccatttcaaagacagcatcattacagacatccattgtcatcataacatttatgaccagtttcctggggccatggttctagaacttttagaggaacagtgtaactcttggactttccccctctaaagtgtggtagctagtgaggcagaaaaggaagtccttggaaacactgagccagtccatcctcagcctccctattttctgttccatcagactgtctcttgactgacagtcctgtagtaaacattttgaggataatttgtgcctagaaggttgaaagtgaattgtgaaaagaataaaaaagcttcatacaaaaccaaaaatattttgcatgtcccacatgcaaaagtaactaaatggttgtgctcattttgtagcaccaaagttgatggccactttctaaggtgaaagccattttttggaagcattgggctccagcaatgccaaattgtatctgtaggaagtcatgtccaggatgcacatggataccaaaatctgtggatgccctagacccatgtggaagatgatgcagtgtttgtctgcattctgtcacatcctcagatatagttcatacaccttacaatacttaatatcacttacgacacttagtataacccctggccttaattagtacaatggggaaacaacataaattgttatgctgacttttttttggagaaaaacaatgagagatcctcctattgcgtgggaatcaagattcactagactcagtacaggttaagtgaagtttattcagggagaatgcactcatacaagaactgggtaactgccgcaagttccagctccaaggactcacccaggctgccctctgtcacccgaccagaagcaagagagccacagtcacctgtcctaatcccagacctaaacccaccccgtcatgtctgcacccatgaccatgcccgctacaggtgctggtggggtgggtatctcacaatagttccccttttaatctaaagaaaagatttaggcttgatacaaaactatatacaaaaataacaaataccaagtgtgctctaggagaaggaaaagtaagaacaaatacacttaagaccgattgccagtgaggcagctagagcaaaaggcaagatctacaagatccttcactgtgttgatacaaacagtttaaagtgattgttttggttgtgttcgtgaggtggaggccatggataccgaaggttgattgtgacaataccatgcagaaaaggaagtccttgttaactgcaaccagtgaaagatcaagctgcagggccctccatcatatcattgaaacaaaggtgaacattttgcctggcaggcaggattctataagccaagcatgcataaggataaggggatactccaaggccacagaaacagggaattctgatctgcactctcgctgtcacaggcgagaatctcctttggaggctattaacacagcttgaggagcagctctctctgcaaccacgatgcagcagctccatttaacattcttgtctagtgaaacagcacaggcccttgtgcctgtttctaaatgcacatttttaatattcaatataatgctactctttaacaaaccctttactccctgcctctctgatggagctcccggggtctttaaagggattgttaacccaagaatggatcgcactctttctgcatgagcaggcccagaaccagcccattaagcctcctgtctttactctggcagtgccgccctcacctctgaggagatgtgccagctgctgggtgatgagctcgggggcctcgcgcaggagctccttcagcaccagcgaggaagaagactcaggcaaccccagctcgccgtcgctctgctcatcggggttaatgactctgacaaccgccgcttccaaacttctgtcctcactagaaaatgaacggagaggaagagaaagagataaggcatgttttcccactttcggggatgattcagtctctactaccacatgaataataattttccctaaatggcccaaaacataaattctcatgaaagattagcacctggagagttggctaagatgcttgcagagtaagtagaaggacctgagttcaaatccccagaacccatgtaaaagcccgatgtactcctctttgttgtaatcactccagcaccacaatggggtcggtggggagcagctgaggcttattggtcactagtctagccagtcagtgagcaccaggttcactcattagccttctcttaaaagatgagatgcaaggaagacttctctggcctgtatgagtttttacccctttacgtgggtgccggtatatacacacacacacacacacacacacacacacacacacacacacacacacacacacacacacacacacacaacacacacacacacacacacacacactcatacacacgcaatcacatccacatacacagaagcatatacacataatcacatacatacatacatatctctctctctctctctctctctctctctctctctctctctctctctctcacacacacacacacacacagagaggggataacaggaccttactctgtatctcttcctatgttatttccattcattactcctccagaattcctggagtattttcttacctctatagtagctactatttagaaacactgtagctatgttcagaccctatgagatgggttctagtaagatcttactttcataaatggggaaactgaggcacaacggggctaaggaatgtgttcatggtcaggtgaccagagagtggagcacatggcttttggctgacaatctaactccagtacctgctcagaatagtcactgaagttcaggaaaaaaaccaccactaggcctgtgacagcttcactatgattttttaaaactcagactgttaattaaataattaattaaaatttgtacttttttatctttggagtgccaaagattaatttttcaggacctgtgcctgctagacaagtgttctgtcactgggccatccctcaccccttaccaaattcatatatatatattagaggtggatttttcaaaatcaggcagatacagataaaacgttttttcttactattcgagaacaaatgagtaacagtaaagaaggctggctctctattttctatggaatattccatttacaaccgtaagtctaaagattataacctcagtctcaaactcaagcctaacagtttctattttaagtggtgacaaacttctctcttaacctcgtgttgtcatgttctccttactcatgtgtgttgtatgagttgtcctgaaaaagttagacatacctttagccaagtgtgtgataattacgaacaccaaggctatctgtggtttggggactgagttgcctccaaaggttcacttgtgcagggtggtacccatggtggaaacactggatgatgctgacagcttcaagaggtgttgcctggcagcaatccttagatcactggagacatgccctcacatggggttgggtgattctagtttttagtttctgccctgatttgaggtgtgactgttttgttcttactcataatataccattatcaccactgtcctctcttggtgacctgatctgagtgttgactctccagagtcatgagaaagataaacctcttcttttttccttggtagctgtgtcaggtgcttcattacagtgatagaaagctggcaaatacaactgataaccgaaagtcagtccaaaatctcacccaaaacttccagcctcttctcaacaaatgattgataaatatttttttcagaagacttccatttgtttcaaacagcaaagggatggaagtagcccacagactattttccaaccaccttgtaaccatttttataactgataactgcctcggtatactttaatccatatgtaagtatgtgtcctaaaaactgattacattaaaaaatagttaaatatgaaggccttacttcaagtattctaaggtcaaggttaattagttttggttatcaaaaataggaaaatgtgcaaactaagaggaatgagcacttcaagctgtaggctgtttagctgatgtcccatcattcaatagcagtagggagtggatcacagaggcacctctgtagtcacgtgtaggtagggattctatcttattcctcttcctttatctccgatcttcgcccagccagcaggcagacaggccaagttctcatttgagctctccactgagtgtacaaggctcctgggcaaagtcatttgtgacactggactctacatttcctgtctatggtatgaggtgactgaactattggggctgtcaacaggctgttcttctataccttataaaaggaaaaccactgaccaagtggcccatttcctggcttccccttttctctatgagatttctttagaacctatctcttttatctggtttcaacttgtgttacttattttcaacatcaatacataggattattgtgacactgtaaggaaatagtattttggtaaattttaaagaatattctacttaaagataacacatttgaaaaatcaaagtaaaaatggagaactgacatagacccgatttcatcaataaagaaaaaaaattactccttttcctatgaagttttttttttttttttacttttaaaacaataataagggacagctgactcaaaagtcttcacttgggacaaagcgcagagcctcacggtgtatcttacctccccaggacgtggctgcccacaagcgttatggacagttttccttcatcgttcagctgatgcaggttaatttcatctcggaatatgtgggatgattcagagatgttcagctcttctaaaataaaccttgtctctgtgaagtagctgaattcagttcttgggatgttcatcactggcaagcagaggaccccaggtggactgacctacagaaggagaagttaagtcagcctctggaagcagcagttttcctccagcttgaagctaattgctaaagagggtataagtctttgggccacaaataaaccttgtgacaatcaaaatgaatctccccaagcccaattacagagcactttccactagtaagtagaccctggtgttatattactaaattattattagattatttatttatttatttatgtgtatgtgtgcgcgtgcgtgcgtgtgtgtgtgtgtgtgtgtgtgtgtgtgtgtgtgtgtgtgtgtgtgtgtgtgtttacatgccactgcacacatgtggagatcagagaataactaccatgagtcagttctctcctcgaaccatgtgggtcctgggaaacagacaggtggtcaagactggcagcaactacctttacctgttgaaccatttcaccagcccagccatgatgctctcttaacttctttttttttactttacctgagatttcacaggcaagccttactgggaacatttaggcctaacttcaaaccttctacaatttaaaaaaatgtatgcatgtacgcagacatatacatgtatatacatacatatacatgcacacacatacatatacacagtctcctctttataagtagcaaacacatgcccttaaggaattgacaaaaaaaatcaataattaggacagactgaggtgacataagaaggtagatctgtcctcatcaaaatggaatacttacaacctgggtatagttaatagcccaagtctagtatagttaaatcttctatttcctcaaggttttctggaaaactgtgttgaagtatggtttgtgacatgggattgtgccactttatttaaatttattttgatttcatatgcattggtgttttgcctgtatgtgcgactgtgtgaagatgctggatcccctggaactggagttagacggtcgtgagctgccctgtgggtgctgtgaattgaaccctggtcctctgaaagagcagccagtgctcttcactgctgagttatctctccaaccctgactgtgacattgtatatatgaattttaaagtaaagtatttttaaaattactttaagggtatagcaataaggatctcactgccactggaagaatgtgggtttggtgatgctttatctctgaataagtaaatagcctttattcttgtgtcactacagctttgtcacaagcatgtgctttttatgaggctcaacatcctagcatctgtctcccttctctaacattaaagggcaggattgttttgttctgctaacacatcaaacaatcaggcagtagtaggcatttaatagcaattccttgaattaaacaaatgaaccagacactgctattgtacataaaacacaaaagcttctccaccaaagtggactttctactgtaatgctaataatactgaatcctagtcacataataattgttagtgatttatgtacagcacgttactcctcctaattgacagttgtgtctaactcctgcaaatgcagtggaggagaatacatgagtcagaatgtgtgtcccaagctgtccaagcaggacttattctggagctgggaccagaaaactagatggcagtcccagcccctgctccatgaatcggagaaagccattctacttcctgggccttccctttctgtttatgtagaatgaggtttggcctctgttctgctcactggagtgtgaaggatgcatgcaaagccacagagccccgagagactgatacggttcttaggaaaactccatagaggcacagcccacaaaaagcagacaagacctaccacactaagacaaagaaaggcagggcatcttagttaggttttctattactgtgataaaggggaggaaatggtttatttcatcttacaacttgtagtctgtcacccagagttcaggataggaactcatgcagaagccctgaaagagtgcggctcacaggcttgctcaacctgctttcttatacagcacaggagcacctgccccagaggcagcactgctctgccctgtgggctgggccttcccacatcaaccatttaacaggaaaatctcctatagacttgttacaggcaatctgaagacagtcattttctcaatagaggttcctcttcccagttaactgtaacgccacatttatttctatgcttagttaaaaatctccaaaggaagggggagcctatcagtctgttttcatttatctgtctacctattgatcatctatctttcatcactcacaatttccctatctccttctttcagggtgcattcccattcacaacactgtaactatagttggtgatgctgttattattatatactttctgtaaagtgcatatcactggtggtcttagagtcaatccagttcagtcaaatgttctctggatgagcagccaagaatagcaaggattgcttaatacacacatctcaactcagatgcattcatcttctcatgccaatcactcttccttgcaaacttcaacaacttgtaagataaatgtgatgcagagcccacatgtagagatgagaatactttacccatcattttcctcagctgccctaaagcggtccttgccacccacagctcattctggaagactgggtttcatgcgaatttaaatcactccagatcagctatgcatagtaccaggggatccagatccaaacaaaattgaaataaaataaaccagactctggaaaattaaaaattccgtgaaccttctggaaatagtacccaaacatttggaacatacatttgaaggttttcaggcaataaagcccattatcgtgggctgatggggtttatagatgggaagtttggacatgatttgttataagggcctttcctgttctgtgggtgagtctgagtttcccagagtaagggagattctccctcaatggacatcaccatcaggactaaaaggcagcaactaagacttacagaacctagattggacatgccatgcccgtttctgagtctccagccagtactctgtgcttcatgtactgttcatataagttattctgcatgtttctctattgccaaaggcacaatcacatggtatatgataaaggaaagacagaggtcccgagttctgctttttattactcctctaaattatcataaaagcaacccactactacaaacatgtttaaatacgttgtttgaaatggctttgagaagaaaccagtaagacatgagcagaaaaacgtctaacccacaggaggtgctcaacaaatgcctgttgcttactggatttatttattatctgcaacaatagacccgaatatgaaaaactaagctagtggtggctcctttcccctatatttcttcttaaaagacacaaaattcatgtacaaaggctatagtaattccctttcccctcaccttgtccagaaagtatgcatatgtgaaggcagaaatcagagaatccaagtcacatgacttaggtccaataactgcatggaccttctccaatcgtttacttcgatcctgcaaccaacagaaagaaaaatcacaattttacttgctttcaactaacatcaagtggaaaaattttcaatgtttctgaagtatacttgtctatattcatacacaatgacagaaaacaataaatttgtcacaaaattatataaaaactgtgtattatgtttaatatgttcaagaagaaaataatttacctttattgaggctacctatggggcctctatccattcagggagctgtatctgcacatacaagtacatacacatacacacatatcatacacacgtgcaatacatacatacacacaaaaaatatgactacctaaaattaacttcctttgaactgtatctctgaggcactgttttcttagtaagaagccatgttgctgcgaagatcagttgcacagagtgctatgattgtctcccccacacaaatcgtgtttcttagcttcagaaacaatgtaattttttctcaaatccctcccataccatgtagtcaaacaaacatgctatctggaaaggcttcattttctcacattctatcatggatgtagaagatattctctctatattgtccttttttaagcaaatgaaacatttttctaattcagaaagtggggtatgatttacatcattgctctaaaactccaagttgtatccattgcttctttaaaagtatgtctattcacctctctagaaaagaacacatactttttgtttgtgtgtttgtttttcgttttgggaggtttactcaatagttattttagattcttttactgaaggctgacatttctttgaaacattaaaacactaagtgcttctagaaaacaccacagcaaattgcctgacaaaaaaattataaatttatatgttttctttcctttcttttgagaaagggcctcatgcagcccagcctggcctcagcctcactctgttggggatggaggagaacctctaatcttcctgcatctactttccaggtgctgggattacagtaagttccaccaagatagatggttaccaaacagtatctttacagtatggtagcagtggcatctgtgtttatgtctcttgcttttcatcacctattttcatcttcctgcttaacactaactagacagccatatattgtgaaattgctccaaaatggcaggactggtcataactgttcaacaaacacttaggatcccttcatgtgcagacaaaaacaatattaaaccacacctaataacctagcaggtatcttgcaaatgaacttgacaatttattattagttgtgtagaactggtggtatcagagtcagaaacaaattattaaacaatgaggatttggcctgagcatcaagatgcagtaaatatttttgcattattttactatgttgcataagacgagtgcaccttgagtatatttatccccacatccactctcctcccctttcatgtccctccccttcccattagtcccctttgtttccccagatagtttcccttctactttcatgccgtctgtaatatacaattttatgaatcaataaaaggtgaagaaaaccttgaaggaggttggatagagcccatcacagagaaaaacggcagagagattttacataagccatccccagttaagtgacactgctaaattaaaacagactcacagtttcaatttctttgatacttatttttcataaaacagaaaacttaaagtgtgatacaaatctgaagatgattacaagccccctcccccattaccacctagtcaggctctcatgctccacccctcccagcttctccaatcttgtaagcatacagctggctcactgaacagaacatcttctgaggcgtttagctaaggtctagattctcaaggtcaagacaacaaatattctagaagcacctaagtaaatttagggaaatagaattccagtccattacagcacgagcaaatgtattaagatatcacattcctgtaaatgctgttcttccgagaagctcaaaggtctggggagacattacctcacttctcccatatcttatgagacagtcagtaggaagaccaataaggctttttacaggtcagaggagcctgtgatggggccaagcttgtttccagaatctacagcctgacacggtgagagctgaccccctgccccatgtaaccacttcataatgccttaatgactctgtgcccactcaagtggacatggcaccgagagaaaagagagagggctaaatatgcacactaaatacagaagcactgaagacattgggaacattggcacagctgacttacctgctctcttgtctaggcatcatcattcccaaaaatctctgtgtttaaccatcaactttcacaaaagaagatgtgcagggcatagcaatttctctgtgttgatgcatttccaaatacaaccccaattattactttagaaaagaaaggagctatataaatgaggattgtgactccaaagtatattagactagttcttcttcatttaaagagatgaacaacacattctcttggaggtcagagacatggtggagactggtgcaaaaccctgagggctcctcatggtgctgcaggctgctttttgaatgccctctcatttctcttctgactactcttctccccatgtatcacattatttcagtgtcgtggtctcttccaatgccattcatccatatggcggctaatatggtggtcagcttgacagggtctcatacagacagaacagtcataatcagatgaagtagatgctgctggcttgaccatcgcagtgcacttccaaatgctctgttggtgcttccccaacagttaatgtgcaaaatgctcaactccccagaattccagatctccatctgaatatgcttccaatttcaaactacacctttatctatcagtaaaatgtgactccttatcaaagttaacttcccagctcttcttcaaaactggaaaaatacattcagactgcactgcccattagaggatagttagggcctaaagcacttttaaacccatccatggaaagcagaggtcctgaccagaagctggcttccagaaccttccaacaactgtaagctgacttgttctaaatttctccctctcagaaataaagttgttcctacctgtaactttcccagtccaaagtcctgtaagagacagtttcatcaaaaagtctttgctagcccatcatagcccctcccttgcccttttctttaaaattctataaatatttatttaaatcatgtttaatttcaattaatcttgctggggcagggagatagctcagtagatgaatgcatgagctctgaagctaagctcttggaacacaggtacgcaggtacacacacacacacacacctctacttgtaaccccagctcttccacagagaaatggctaattgaacagggcagaaggtaataaagggaactcctgggaagcttttaatctctatatgtgcaggtgcatgggtacacaggaacacacattaatttcttttagaaaatatttttctggggctggagagatggctcagaagttaagagcattgattgctcttctaaaggtcccaggttcaattactcgcaaccacatggcctctcagaacagtcgataactccagttccaggggacttgacaaccatgacaaaaaaacaaaaaaacaatgcacatcaaaagaagaaggagaagaatgaggaggaggaaaagggggaggaggaaaattatttttctgataagaaatatctgccttcatatatgatataaattaataaggcaaagataactactgctaacattcactgtacacgtgttttgtgtttatatttatacatggggaacttctatttacactttttacaaatttaatttttccattaccaaaaatatgcatcttcatcatttgttttgtcatttactatgcatttacttaagacagtatatcactatgtatggcaggtagccttgggttcaggatccttctgtctcacctccaaagtgctaagactgcaccacagtgcccagcttttcattcactttaaatagctgaatggtggagagagagagagagagagagagagagagagagagagagagagagagagagattcctagaagcataggtgactttaaaaatctctatggggactggagagatagctcagcagttaaaagcacttgttgcttttcaagacagggtttctctgtgtagctttggagcctatcctagcacttactctgtataccaggctgccttgaactcacagagatccacctgcctctgcctcctgattaagattaaaggcatgcggcaccaatgcctggccacacttgttgctcttgcagagtacccaggttcagttccttgcacccacatggggtgctcacaggggatacaacaccttcttcagacatccagaggcaccagacatgcagctggtatataaagcaaatgagtcatacacacaaaataaaataaaaaattcttaaaatattatattgctaaataggatctctggctcactggcttcctggtatgggttcaaataataaaaatactaaaacctggcatcgtggcacacacgtgtaatgctaggagcttgcgaggataagacaggagaatcacaacttggaagctaggctgttttcttttttaatttaactttatgtgtgttggtgtgagggtgttggatcccttggaactggagttacagacatttgtgagctgccatgtgggtgctgggaattgaacccaggtcctcaggaagaacatctagtgctcttaacagctgagccattgctccagccccaaagctaggctaagttttataatgaggtttcacctatgatggttaatagttgtcaactagactagatttagaattgctgcgggaatacttctgggtatgtctgttgcagcattctgagaaaagtgtaactaaagagcaaggactcactatgaatgtggccaataccaatccatggcccagggtcctggatggaataaaaagaggatacctgagcaccagcatctattctgtctgaacactatgtgaccggctgccttacactcgtgctgttatgtcttctctatcatgatggatggtaccctcaagctgtcagtcatagaaaccctcccttcttctagttgctcttgtcaggtcttttgttacggcaatgaaaaaaggaactaatcaagtatcctaaaaaatcaatttaagaataaatttcaaaaacaaaataaaaaaggaatcagagattaagagatcataattagctccttcttggaggtacacctcaggttgcgggtaaaagcaaacgcattcaccagaatctgcaagtgcaggacacggcatattatattcagttttcttataaatgtcacaattaaatttgtgacctaattaggaaagaacaaagggctttcagtagtgaagactgaaaaggttcatgaggtaatataagtgccttataaaaccgaaatagtcaattccgatcaatgtatgttgctagtggcctctgccctcatcactactcatcctaaactctcatggctgaggaaactgagctaaaatgatgtgctgagtccttagactagctagggaaggaccaggctgggagcacatttccacaaattccagctgcagggctagataacagctggatatgtccactggactgcagaacagagactgtttttacaatgaaaataaaggaaggaacacataagttgttgacattgattgactacagctaagaggagcaggataatgtaaagctccatgcctttaggaatacaacagtttatgaggaaagtgcctctgtctatgataactggtcccttctcataatcagcacatactagagtttgtcttttgtgagtttacaagtcttgaaaatcctcccaactttccctttcaagactcgggggctgtcatcttttttcatggtgatggaaatgaacctgggtcctcaatcttactcctcagctctgacctaacttgtgttatgcttagtcctccacaggaaagacattcacactctctgggagatagcatttggtaaaggttctgatgccaatccatccacatcaaaggcaatctgaaggtttcaaaaactgaatgcgaaagaatggctcctatatctggcatgcacccatgcctcctgaggtttacataattacttatttaaaaatttgtaaaatagaaagtcacaaagggaacaaaaaacacccaatttcccaaattaaatcaattgcttgaacatttagtgtattccttgtgatatttttccccatacttctatgagtactctttcctgatatatatgtttgcattctctcttctgaaatttgacaaggctcttaaattactaggatacagatatttcaatacctagaaatggtttgtttgcttgtatagccccagctgctacttggtacatttaatgattttctttaatatggctccttataatttgtttactcaatcttccactggtagagacttattttatttaaatttttggaagcaattaaaccttctgcaatggatatttgggagggaattttttttgcatccactcctaatatttctttagaataaactcccagactttaaatttctaggtcaaagaatgtagtattttaacacttaccagaaaggtttccagatatactgaattgttaactcttcaaacacatgttcaagtaattacattagcaggtaaaataacaccacagtgttgtttgattgcttttttatggctgtaacacagtttgatccttttctttttatgggccccaaaacattgcctgcatgcttttatgctacttaccctactttcattgatgactaaactactaaaacattaacatactgcactttggtaatgtctgtaagattctccttcattcttggaccgtgggcatctgtgaaagaacctgtccgataagttgcattaggtacacagtatacatgcattatttaatagagcattatcatttttagctctaacaagcagtcattctccgtgccctcttttccccagcccactcactttgctgctagatgaggtttcaacaacatgatccaaatttgacagaagagcagaggtctgcaaggtcttaaagggaactcattgactcttctgatttgcttgagatcacaatggtaaaacaacttactgctcaatctaagatggtgacgatatcattattaagtgcttttggacacagacagattttgatagacaacagtaccaaaagaggaatgataaataataaataggagaagagactgcacagagtcctcacaatcttcccactggtaggacaatctgtgaaccttccaaggagcttctacacactgagattttaaaaagtcaaccaattcaaaggaataccaggaaactgacgtgtctaggtaactaacagaaaagaaatgcacacttgagtcggaagtcaacttcattagtagtcctggaggtcgagtaagactgagacaattggtaaaatggctcctctgccccaccatgtttgcaagaaatcctgagaagcaggtctgggagccactgcctcaataagaagctgtaataagctccttaagacgatgagaccctgtcagttgtagaatgtctctgacatcagtttagacaaggagctgctgcattgcttcaaaccaagtctaactttagaaagcactgctaatgacaacactgtgatctactaaaattgagagttagacgagcctttaggattcaccacgttggaatccttcaatgttttctcatgtaaggttgtcagtgtactatggtataatggaagaaataacacacacttagggctactacagcctgttaaatattctgactttagaagtattttaaatgtgccttataatgctatttagtaaaactgaaagaacatgtattgaaagaatgactaatcaatgtccattgcttctatttgctcagctttggatttaatatgactaaggaaggcaatgagggaatgaagaaagaatagacccacagacgcacatagagaaaagtggggatgggatggaccgtgctctcaaatggagatgcacaaatggtctggaaactcagtgcatttattatatactgctgaataaggaggcaggtatattgtacatagttgaacaaggaggtaggttaactactctctgtgggaggtctctggaggagagcaggtacaggttgtagtcatccaggaggaagaacagtggttgatagcttccacaaaccctagtgttagctacttagactaggctttgccattctcatgggtctgaggcattgggatccttgacctggctgtgctcatgtcaataatacacattcacttaggacttcctctgccacacccagtgtcaattacttctacagtcctcgtttgaatgattcaagacccaaagagtctccattgacatcaccaccaacgatcctcggatttacacccacaggccaggattttacatttggtgggggacatctaaggaattatagagctttatatggtgcttttgatgagattttgcagttagttaaacaatgaatgactcttttacttagcaatggtaagacacacaggtaagactcttttgggcaatggtaagacacacaggcacttttaaaaagtgaattcttcaaattgagacatttccacaagaatactggtaatttttgaagctaaaaagagggacatatgtcattctcctactcctctctgctagtatatgtctaagaacttaaaaaaagttatatgacattgcaactaaaattaaagaggctgaaaaggaggaaaagtctggctttagctggtaccagaggccccctctctggctgtggattccactctaagcaatgccaaaggaaaagaagagagaacgtgagattcataaatatttcatttttctttaatggattctctcacaaaaaaatgtcttctgccattttacatcatgtttccagaagtaccttccataagctggggtctagatcaggtctgtagacgtgcatgtcacccctcctgtgaccagcactacatagcacaggttgctgccatttctttaattatttctgttctttggcttggaagggctggagctaattagtcaggtcttgttgtcccatctcacccccccccccgcccgcccatgaacaagtagagacacgctcagaaggcttctcccagaagcttggctttctgtgctcagcttgcattgtcataggaagatctattgctttaatactcgagagtatttgtctgtatttggaacagacatcaggcctgtgacaccacacacctggtgcatcagaaatccactcagacatgatagtaatgaacagacacggggctgaaagcaggcaggaggaggagagcttctgagagtggtgcacaggttcacagggacatatgcaagggatatgcagagcaattattgtactttgcaaagatgacagtttttaatgatgtcattatttgttacactgtgtgtttttcaatgacagaaggactctcaccttccaggtgacctcggtgttcattctctctctgtatatacacatatatacacacaaagcagatcaagtatatgatttttgcaatcctctccccccaaattaaaactaaacagtacctaacacacagcagttatatatacagtaaagatttattacaattcatgttttatacattgaacactgtagggggatatggttgtaaattaagacatttctagaaacaagtaaattctgaattatcccactggtaatttatttattcatttgttttggtgatgagggttgcttagttggtttttgaggtaggatcttatgtatcccagccaggcatgaaccgaggatgaccttagactttttaactcctgcctccacctcctcagcgctgtggactacaggcatgcaccaccatatctgggttttgtaattccagctatcaaacattgggattcactcatgctaaagaagcattctatatctgagtttcatcctcagggcccccactgatatttgaaaattatgaatatgttagcattaactgggtccacattctagtagagataacttcaccacagagttctctatgtgtcatgtcctttccaccatgagataataggacttaagagtttcaaagaagcaaatagctactttaccattatccaaatattttccttttgtccactgagagaactatctggagtctgaaaagagagctccatagttggcaaggtttttgttgttttgttttgttttgttttgtttttaagattaattttactctaattatgtaaggaaaggggcatacaagtgagtgttgttgtccttgaggtcataggtgagtccctggtgctggagttacagtggttgtaagctgcccagagtgggggctggatcagaagaacccagtcctctgtaagagcagagagtgcttctaactgccaggtcatctctctagcctcccacagaaacagttgcatttccttttgtacctttaatggaataattaaaagacagattatagagaatacctctaagaccaaactatcccaacacatttttcagtctttatgttaaaaaccaatcacctcaaaggaaaaataatgtataacagagtaacagagaaatttttagtttttgctttgttggactttcaattagaagacatatttaaaaatttaagatggagcaagatttttaaatgtcatggaaacttcaatatataataaaatcttcatagtaagccttgtgaaatagatgataatcagtgtttaagatgtcttactcatcttgtatgataaatctttatccatttggtctagtagctctgctcaataatgaaaaatatgaaactctgaattaaagactcaatcacctattttgcttagtttcttgatactgtggtgtcttctctgaagatgccaacctggggagtcatcatcaaggggacacttccctttgtagctagtgcagagtgcaagtccttcccagggtggaaagaaacagcaatacagggaagtttgttggctaacctctgaggaggggtggaagagtacagcctgaatatccagaggagtggatatcaacagtggtatgatgtttgctcggtgattgtatggccccaaaccaaaaaaccaaaaaaaccaaaaaaaaaaaaaaaaagaaaagaaaagaaaacaaataaaacaaaaccaatggccaatcaaccaaacaaaccagcaaaacataaggagccatatgcctaaatatgtgcatgtaaagatggcttttgaaaatatggcttttaagtttactaataatttaattcactcttcagagcagaaaggagggggactgatgttttaaactaacaaaacagaactgcaaacctttgtgggtggttttgagatatagtggttggaagaacagcttaggagctctgtgtgactgataaatttcacctaacactaactgaagagagaaacacaactgacaagaactagtccttggacacagtgagaacatagagtacccactctcacacaactccagggggcaccatttacacagaatgggatgatgtcatttgatagagcctagtccaatatgacatgtactaataaaaggggaaatttgaacacagacactaacagaaggaagacatgggaagaagccatctcaagccaggggatgctgggcccaccatctgttatgtgaggagcctggagtctttctttcttggcatctccagaggaaacatggcctagtcaactgcatcttcagcatctaaccttcagaactgtgagacaatccatttctgttgttaagccacccaggctttggcagttagttacagcagtcctgagacttaggatatcaaagcagtggtccaccacagattcatggtgcaattctttccattttttgtacatgttttaaatttccaaaagtttttttttaaagaagctttgcacacaatctcagagacatgaataattcaactgtactctgccattgtcctcctgaggaaaactctcacagacaaaagtatctctaatatccaaaatacagctggtcctgtctccagcctgagtctaatttcacatctgtaattccttttcgaaaaatcgctggtaaatctcccaaacaaggcaccagcaagcaagctctactgcacctcctggctctttcgggttcccagcggcaaactgcctctctcaagcataattgaaggcagcctcatggtgcctgagaaattcacacaggagacaagacagagagagggggatctttctgcactgagccatgataaagtccttccaatttgtactctgcccaaacaagaatggcctgcacaggccttataggtgtcatttagccatatgtcatgaaggacattaaataaccccataatcacatctaaaggctaagtaaaccaggctaccacaaatactaaaatggatgataacaaaagcagtcagcattttccaaaccatatgcttgtaaatggtattctgcagggaaccaattaaaactatgggatacttagaacacagacatatggaacaaaacagggcaacttatcttgtcacttcaatgcttgctcagtacatctattagtgagatataataccgaattattagtacaaataaatgctatcttaattatcaacaccaaaaggcaatggcagggcttaaggcctctgcctgggtggtagtgttactactcttaaaagggagggggtctacagtctccaaagagtcacatgaaattttggtcatgttaaatatcagaaatataattattaaggcaaatatttgagcaggctaggtctctgctttctcctctggtgcaatagaaaaataaaaatattttctgaaactcacatggttcccagtgaaaccacttaaaaagtgcacacggaaaaagcatacagggatgtgtgatgccagagtgaaccaagagtgatgtgtactgctaccgaacgggagacatgctggtcattccaaagaagcaatcagaagactgatttcaacagtcatcaacgtaaaaatttagacagagtattactaagattccctgacactaaaaaaataaaccagaaaacttaaaaatctgtgatccattcacaaatcagcctaataggtaaaagacggtcaacattttccatccagttatttgagtttcatttgccattatcagtcaatttagaattaacatttaagggacccagacatataaattctaataagacagcccaaacataattaaagtaatactaggaatggcagccttgatcaatgccatggagaattcatcaaatactaaatgagatggacatatttcatatatttatgaagaaatacaactggctaataaacgttatatgaaaaacagtcaatatgcttagccatcagtcaaacacagatcaaaaacaccaagattccatttcaccccagtccaaatagctgtgaggaaaccaacaaacgctggcaagggagggctaagaagagaacccttataaccttgatgggggagtataaattagtgcagataccatgaatatcaatacagtggttcatccaaaattgaaaactagaactgtattatggtccagccataccactctggctgcatatgaaaaggaatctaagtcagtggagcacagagatagcctgggcacaatagccacgttatagaatcaacctcactgtagctgggtgttggtggcatacacttttaaacccagcactcgggaggcagaggcaggtgtatatctgtgagtttgaggccagcctggtctccagagcgagtgtcaggataggctccaaagctacacagagaaaacctgtctcgaaaaaaaaaaaaaaaaaaaaaaaaaaaaaaaaaaagaatcaacctcactgccaatcagcaggtgaatgaacaacaacaacaacaaaaatgtgaccatatatacaaatatgtgagtgtatttggctattaataagaacaaaatgattatatcatttgtagacaatggacatcaccagagaatatcatgtcaaggaataaaacaaggccaggtggttgtggctcaagccttcagcattcaggaggcagagacaggctgatgtctgtgagtttgaggccagcctggtctacaaagtatgtttcagagcagccagggataaacagagaaatcctgtcttgaaaaacaaaacaaacagacacgcaaacaaaaagaaataaaacaagactcagaaaggcaaatgtcttccctagacttaaaactgtaacacagaaggggaagtctatttgggaagagcagggggcagaagtgaggataaaacaggtcataagaaggcgagtaagatccaaagtttatgacaggcatgcatgagaatgtcatcaggaaacacagtattttgtgctaataatatatgttaataagagacataagctaatgataaagatgagattagagacaggagaaaaacaaaacaggtcttagagtgaagaattctactgcttgtcaccaatgagatcagtgtcattccacgaagcaccgagcatcaatacaaaccataatacagcattttcacacgtgtacaacctactgtcttgccaatgacccctcaatggactgtttaaaaggactgtgctcttggtcctccccacacacaccaatgtatctcaagacagcacctggtgtgtctatgcaagcccactttttagacttcaagttgtctttctaccctgaattccttctgctctcctgacctatgaaccatgaactttttgcagagctcagacccagagccttctgcccactgataggtagcccttgaccagggaggtgccacccagctgttgtctccttaccacaatgtcactgttcctcagtattctccagttccagagatttctgaactgaaaggacatcatcatcttactacacagggtttgcattttagttatctctgtgagtccgaggctttggtatcctatgcacagagtagataggaactcactttagaagtaaataaatggcaactgtagtgtgagagctctcccgtcactcaagaaacaccatccctaaccttctccccttccttcctatcagtgtccctctaacaaacttgagagaatagcatccaggaggcacaggaggcactgtcaatagcagcgctggctctttctgctacatctaatgagacagatctagagtcaggcccgggtgcttctgtgttggacatcttcctccccaggtaaatacaacacagcaaaatttaagattcatgtattatagtagaaaatcctgttgcccatgatcagaagaaaacattccataagcttgcttgcaaaaacctgtttccagagaatgggttttagaagaaagcaaattgaattggagacaatggaaataaaagacatataatgcatacttagaactcaaaaactctgtggtggatttgactgaggagaattataggtaactgtgaaaggtacttgtatagtgaaggagcagtgcgctacaccagggaacgtaaaggcacctgatacaccagggagggcctgggaatttggcctcctgaccagagctccactgccacgtggggcttcctcccatgatttctccatagcaagccacagacaacactgattctgtgtgtaaatcagtacagttttacatgtctttctttgcttgttcttctagttgagctacacagacatacctatcacactgctgtggggatatttccagcatggcccaacacctccccattactgttagtagaataacagagacaatccgcccatggcaatcattctaactcttctatttcaacattccctctacccccagaatggcactctatacactggttttaaaataaccacaagctcttgcaagtgacttaaacccacgaggaagttttacatataattaccccaatgtctgccatctctagaatcacagcgactctagagaaacactaatcaaatgctggtgcatggaagacttttaggcatggaatttaatacaggttgacacgtttgaaagaaagttgtctcctcaggatgccatgagacagaaagcttgccaataaggaggctggagacacagggtactgagccccacttgctcactactaactagctatgagaccctgatctagacactcctgtatcctcagcctcagtcagactcagcatctctgaaataacaggctgagcctgaggctcactacgatcatgtaaattttaatgttctagaaataggcaaagaaattctgtgtggaagatggatcccaggaggaactgcattttaaaggaagacttactgacttagtatttatttatcacagggagggcctttgacgggagggctccaggaattgctatactctactctgatgtgacctattaggaatgtctacagtcataccacagcaatcccccatggctgttggatccatcctaaggtttttccgctcagcgtttaagaaaaaaggaaaacattagaatgccaaaacagagtatgagagaatgaataatctgccaattgaagaaggaacatttccttggggttataaataatacacagttcaagtttttttttttttttcaggaacaagcaaccattaccttttataatatcacttccagcctctggggtttgaagagaaaacctctctaatggatacacttgcccaaaatgaacaacaaaatctactttggtgcagtgtcagatacacggtgacccttaggaaagacatagcatgtggactcacaggaagtagagctagcagtggtggtggtattgacagattgtgagcctcatcaagctgttcagcaaggtgagctggggatcaatagccacatcagcaaaatgcttcgggtcttgctgatttctcagaatgtgggtgctgcaaaaaaagagacctgcactgtggtcgatctgacggtcctagaggccatgagagagtcaagatattgatgactgagtggggaaaaaaatacataatggcttcaaggacatggcagccagttagaggaccaggtgctctcttcaaagacagcttaaaaaaagtgaagagcctgcgtatccataagccacatgagcatgtcatacactcataggcaaggattccctagaaagggtggggtagcatgaactagcctgtgatcacaattttcctttgaaggaacgcaggtcctcttgaccttcatttttctcctccattgtcaagtttctagctatataataaagttatttagaaaggacagcaaccatccgaaagctacagagctcttacatacctaaaatcagctagctgtcttctaagagatgtcaggaagaccattcactttgaacagttacaggaactgagacaaggatttctgatgagtgaagctggaagtgaccttagcgtcttttctgtcccataacagaatacttgagagtgagcaatttataaacaaggaagttcatttgagctcacaattcttggggatgagaaatccaatatggttggatagccatatatgctgagggccctatgtttcctcataatgtgacaggactcagaagggcaagtgggcaggtaaggaaggcagaaaacatgaaaggcacacttgtttcataacatttatcctcacagtagttaacttaacccaatgagggcaagagttcactcattgtcacaagaaccaatccagtccaaagagaaaggtctcattccctctacccaacttcattatctctcatcatccctaactcctaccccccaccacagacatccactacccaccatctctcacagccccacctcctaccatagccacagccaccacaacaaccaaacctcagcaccagttttgaagaggacaaaccttactcagacaagagtcttgtcatatgggcttttctttctttatgatctgtaagactctgaggcagaaatccattcattcctccaagtttcaccagttttgtgcaagtaccaccagaatataccatttctcaagctctctttcaaaattacatagaaacaaaagccactacacatgctgattaacccatgtcacccaccaaacaatctcagttaaatggaatcactctcgttctgaaatatatatatatatatatatatatatatatatatatatatatgctggagaggtgactaagcagataagagaccttggcactcttgcagaggacacaggttcaggtcccagcacccacacagtagctcacaaccatccaaaactccagttctaggggacccaccaccctcttctgaacctcatgggtaacaggcacacatacaggcaacatgcatgcatgtagacaaaacagttatacacataaagtaaataaatttaacatatatataaaagaaaagttgtgtcagcatataaaattaagaattatgaaatgaaatatttttaacttcccacttggagggattaccgctaatctacattgcagtaactccttgaaggatggtaagccatccacagctgaccctcaccaacatgctgaaaggtgagctgagggactatgtagagataggcaagtgcttcccaaagcacaacctcgttagcactagtatctcagcaaagcttctggaaagcactgtgtttagccgcatttacccttgtgagcacaccacagggcttcttacatcttagcttatatgtataaatcactaggctttgagagcaaaaggaagaaaaagagaataaaggtgggaggaagagagaaaggaagagggagagagaagatagagacagacagacagacagacagacagacagacacacacacacacacacacacacacacacacacacacacagggaatgaacatcctaggaaagcatgctgggactgtctgtgcaccaccattttgttaaagaacaatacatgtttacaccaaaattttagttgtactatactcaacaccacctgacagatatttgcagaataccagtgagtcagacaccatcctagaaggtgttagaacaggagaaacagtgctgacataaaataaacagatttatgtaatttacataaaaattgtagcctacaagaagaaattagtgttaaaaagtatgtgtgtgcacctgtgtgcatgtgcacacatatgtatgcacacactcacataagtttgatagtctctgtgctaggaaggagacaaattttcactaaagtagacaaagaaggaaagacaggaagaaaccacaggctgtctgcagacactccaggccaggatagagcaaacactggagagattgcatcagagagaaggatctgaaaagtcctaaaaaagagatctcttcaaagaagcctaacatttaaatgccacatataacctaaaaacacataattccaaactctgatacttgatcgtgaactatcactgagcccttccttcatgacctacaaaagccaggggcctctggcattattttaatgacaccacgaagccaaatctatcttcgtgaaagttagaaaatactatttacaggacatttagactagccagtagctgttactgctagctgctgtgtagaagctgtgctagataacaccaccagagcttaggaagaatcacggaggctactagccaccacagagtccttcatagccactgctgcataggaccagagggccagctccactagacaatgttcttgataaaacagtgaaaatatatttgtttaattaagtctcccatcttaagtacacttatagctctttttccacactggtaaaacgaaaagaatgaacagagaatttcctttgccttctaaagaccagtggtttctagaaagcaaaggaattataagatcatttgggttgtgcgctgaattagctactgtcctgaatgcttttacttttgaaaatatggttcttttttagcaaaatgtatcacttaaaacatgtaattagtttatgctctttttctggactaatgagtatttaatttgctccaattaaatttctaatgtgaaaaatgttggcaaataaagtcacataacaaggtattgataattctgattacttttttcttgtctttttaaagtgatttattgatttttatgttatgtgaattggtgttttgcccacatgtatgtctctgtgagggtgtcagatctcctggacctggagttacagacagttgtaagcttccatgcgggtgcctggaattgaaccctggttttctagaagagtagccagtgctcttaactgctgatccatctctccaggcccaataattctgattaccttttaagagtatgagggtcctgaaactaaaaaggttgagaaatgccataacaataaaatggcaaaaaatctattaagtcttttatataactatccatgcactcagacacattttttattttattttattttattggttttttcaagacagggtttctctgtggctttggaggctgtcctggaactagctcttgtagaccaggttggtctcgaactcacagagatccgcctgcctctacctcctgagtgctgggattaaaggtgtgcgatgtattttatttgtttatgtgtgagtattctgcctttgcatgtgtatgtacgctacatgtatgcctggtgcccagagaggccagaaaaggacatcagatcccccagaactgaaattgcagatggttgtaggttctaggaatcaaacctgggtcctctggaagagaagaaaatgtccttaactgccgagccatacatatcttcagctctctcaggcatatcttctaaaatctaactgaaattaaccactttaagacaaacaattcaaagccctttagtacattagtgttattgggttaccagcacaatgtctagttctcaacattagtgttgttggactactagaatgctatctggttctcaacatgttcacttctccaaaggaacaccctggaagccatcagcctgcagtcactcgctgtggacagacctatctggggatttcacacaaatgcaatcatgtaccatgtgaccatttgtggctcacttggtccacttaacattgtttccaaggttctatcacactgtcgtatgattcagggcttcatttggtatacattagtttttaattttaatttacaattctcctgttcttttaataataaatacaggatctccaactggaaagtctacttgttagcaggaatgtatatagcatgttagcaagcatgctttttttgccaaagaatatgtagtatgttacagattccagcttcatataaagttatttctacacttgtgtatgtgtattactatcaagtctataaaacgtttattggccaatggcatggattattagtcactgtgtaatgtttcctaacaaaatatgcatctgtacttgtagagaacttttgtttactttgccttgtttatttagaggaaatgagcagtgtgttacatggggataaataattccaatcaggaggacagtgtcagagtccagatcagcccctcactatgtgtaagagcttcagaacttgacttcctgcttcaacctctattttctctctccatctacaatataaccttacagttctccctgtcaaagcaaagatccaatttttctgccctttaaatgtgagtcagccttgtgatttgctttggccaggtgatataagagctcatctgggccaagctgaagtggtatatatataaagtatttcacatggtgtgtcccttgtcaaaaggcagtaactgtcatggaggtgtatatgaaataaacagcatggcctaagaacatggccacagacctcggactccatgcttctcccaccctggtcctcttctcttctccacttgcctactctttggtcctgtatacttgggtaacaactcccacaaaactgggaattaactggtccattcttgagttcactgcaatcaaaggctcttgggtctatctagatgtgaggatagttataatattatctgtgggggttggttagaccatccctcatgggtaatgttgatcccatacctgaagaactcagaaaagaaccacagcatggaactcatggctaagggctttgactttatatagtgttcaaagtactatattttatcctagttcaattacagatgaggaaaacaagttgcagaggagaagaacacataagacttggtccttgctgggcattggtggcgcacgcctttaatcccagcactcgggaggtagaggcaggtggatcactttgagtttgagaccagcttggtctacacgagctagttctaggacagcctccaaaggcacagagaaaccatctcgaaaaaccaaaaaaaaaaaaaaaaaaaaaagacttggtccttgttccccaggcttcaatcaccaagagtttttctctttcttctgtagactctgtgtcttcaaagttgttatttaccattccacagcattattaattttggaatactgaaacagattcttgctgtgggaagcccccactatggaaaggttaagccaagtctaactgcttgctttgcagtcaaagaaagatatttccagccaggatcagtgattgctaagtcttaatgctcctccagaaggaaaggcattaaaatgcacatcaggtcaatcactgctttctcccctacaacatggcactatgcacaggtttgatttgaaatgaattctccaataggagattacagagttagggaggcagctccacccaggaggcttgccttgtcttcatggcagctgttctacaggcaccacactttgatttaataattatttcccaatggggggaaaataagaaggctccattctgacaccatgtagcataaacaggaaaaaaattaaatgaaatttagagagagttgacatcccaagcacactaaaaacatatgtaaagtcattcacacctcgctggagtaggtttcaaaagggaattaattttgctagaaggaacactaagctatgccaggatcctttttttaacttctgatttgcttcacaggatgaagtagtaccttccaggtaagtgccttgtaagctgggaaagtgagaaagcatcacacagcaaaggatattaggtgataagacctttctcggtaaaaaaataagaccgatgatctctcattccttcccttgacacgctctagttctgactgggatagcagaaagggattaggagaggctaaaggaatgccattaatgtttttgtgtgtgtctacatcagatatggactggaggtcagagagacagatcagcaggtaaaagcattagtcatgtaagccttgtgatcaagtgcaatcacaggaactcttgtgaaaaaagccagatgcagtggtatgcatctgtaatcccagcatcctccaggaggcagaaacgggagattcagccagaagatccatgggcaaccagcctggagtacacagggcagcagaaatgagagacattgcctcagtgaggtggaagggagaactgacttcggaaagttgtcctgtgacctccacccaacactgtatgtagcacatgcacgctagacacacacacacacacacacacacacacacacacacacacacaccacaatgcacacactcatatagacacagtcataaataaatgacattccaattggtgtcctaggggttggaagaggtcactatctgctgacaacaaggccccaaagcatgatgggtatgaatatggactgtggtactgaactgtttgagcttaaaataactacttttttttctgcccatgagagtaaaactcaccttcctccctcagtttatccattattataaaacagggataactaaggagagttactgtaaaaataaaattatttagtaaatattaaaataatctatacaatcctcttccatgtgtctggatggataaattagatagcattacattttataaattggcctagttccaaagaggctcaggaatgtatctgggttcccatatcaagcagttggacttgacctttttgttcttctaccctggctttgtttctttccccctcaggctagcaggctgaggtgatggatatgagacttgacaactctgcaggccagaagcctggggatgtgtccataaattccttctcagcacctaccactgacttccagatagaagccacagagcctctgctccccaccctagtctggaatttcctagtaacatgccgctatccttggaaatgctcctgctcatgtagcccataggtactatagtcagccactgaattgtttgcaactctgtttaaaggactttccacatactggctagaatggggtaaacatagcccagagatcaccatgtctgagagaaagggttactgattttgtcaagaggccaagaatgtacctctctctgtccagtgttagttttgttttattaataaaccttgaactcaggagtataaatctgattatctattgacctaagcttggtgactttgaagtcttcaatatgtttttaaggagttctgatacaatagtgtcaaagtcactaggaacatcagagtacacacccatgtattttggttatgtattaatcatatatctgacaattttacatacacattttcaatcttagaatccccacaaagaacactctattgtaagtatcatctcacaggctaaggtactgagaatttggagggttttttcaggagttcttgtcttataaatgcttctctgatgacctacaggaaacaattaacctccataacactctaacttggtgcacagactctgcctgatgtcatcctaaaggagactgtaaaaatgacctctccccagccattaacaggagagaggtgagtcatagcacagagctgcccaacaagcttatgggctttgtttgtttagttggttttgggtcttgttgttattgttttgggtttggtggggttttttatttgtttgtttgtttggttggttggttggttttgtttggttttttgagacagtgtttctttatagtcccagctgtcctagaaatcactctgtagaccaggctggcctcaaactcagagatctgcttctgcctcccgagtgctggggttataggcgtgtgttaccaccatctgggaaagctcatggtttttaaataaaatcagtgtttttattttgtgatgagttacccactgaccattagagtaatataaggtctaaatgaccattagagtaatataaggtggttttcactgccccttattcccttcacccaggacaagatgacttctagctgtgaacaatgtaacaggctacaaaatcattcctacttactaacttgccttgctgcaaaggtgaaatcatgcaaccttgttccatgcatacacactctcagagcagaatcctaaccccagggcttttcaatatggcctctgggtttgctttggcatatgaagttcaagtggtgtgtatttctgagacgcagcttcacattgccacttgtagcagcctgagttcttttcaaagacctcccccccccctcaactgaagccaggattcttgccatcaccacagggggaaacaaaaacctgcaggacaagtcaatatgaagaagaccagtaacttggtaggcagagagttgagagatttaagcatgggcaatagagagaggggcacttaggtcgaggacagtatgcactcaggtgtggttacagacttctcaagagtgcttgtgtttttgcagttgctgtgtgtacagtttgggtggctggttacatctcaaaacgttactgaagacattcatttctcccttttcccaccacatgaggtcagagaatgattcttgagatactctgtatatgattttagctgggaaggttaactccatgggtcccaagggtcacacgaagcataaagacacatttgtactgtaaatgaaagttatgatcttgtttgtgaaacggttgaaaaaaattgcaggtttacatctggaaatggaagaaggccatcctcagaggcaatcacttggggcctaagtatagctcatcgctatttcaacattcttatttgaaatatcccaaagaaatatcaccagagtgaggtagtcacataaattatgttagtaatctaaaattattgactctgaactggcaagagagttcaacctgatttgaggacaacaaactccccttccgttccaatcctctaatgtttccctgtctt
